United States Patent Application Publication US 2025/0388913 A1 - sequence listing, part 2

SEQ ID NO: 22 - DNA, 300042 bp, Artificial Sequence
  source: /note="Description of Artificial Sequence: Synthetic polynucleotide"
  modified_base (4)..(5): a, c, t, or g
  modified_base (12)..(13): a, c, t, or g
  modified_base (20)..(300019): a, c, t, or g
  misc_feature (20)..(300019): /note="This region may encompass 0-300000 nucleotides"
  modified_base (300026)..(300031): a, c, t, or g
  modified_base (300038)..(300039): a, c, t, or g
  source: /note="See specification as filed for detailed description of substitutions and preferred embodiments"
gacnnggtctcnngagaccnnnnnnnnnnnnnnnnnnnnnnnnnnnnnnnnnnnnnnnnnnnnnnnnnnnnnnnnnnnnnnnnnnnnnnnnnnnnnnnnnnnnnnnnnnnnnnnnnnnnnnnnnnnnnnnnnnnnnnnnnnnnnnnnnnnnnnnnnnnnnnnnnnnnnnnnnnnnnnnnnnnnnnnnnnnnnnnnnnnnnnnnnnnnnnnnnnnnnnnnnnnnnnnnnnnnnnnnnnnnnnnnnnnnnnnnnnnnnnnnnnnnnnnnnnnnnnnnnnnnnnnnnnnnnnnnnnnnnnnnnnnnnnnnnnnnnnnnnnnnnnnnnnnnnnnnnnnnnnnnnnnnnnnnnnnnnnnnnnnnnnnnnnnnnnnnnnnnnnnnnnnnnnnnnnnnnnnnnnnnnnnnnnnnnnnnnnnnnnnnnnnnnnnnnnnnnnnnnnnnnnnnnnnnnnnnnnnnnnnnnnnnnnnnnnnnnnnnnnnnnnnnnnnnnnnnnnnnnnnnnnnnnnnnnnnnnnnnnnnnnnnnnnnnnnnnnnnnnnnnnnnnnnnnnnnnnnnnnnnnnnnnnnnnnnnnnnnnnnnnnnnnnnnnnnnnnnnnnnnnnnnnnnnnnnnnnnnnnnnnnnnnnnnnnnnnnnnnnnnnnnnnnnnnnnnnnnnnnnnnnnnnnnnnnnnnnnnnnnnnnnnnnnnnnnnnnnnnnnnnnnnnnnnnnnnnnnnnnnnnnnnnnnnnnnnnnnnnnnnnnnnnnnnnnnnnnnnnnnnnnnnnnnnnnnnnnnnnnnnnnnnnnnnnnnnnnnnnnnnnnnnnnnnnnnnnnnnnnnnnnnnnnnnnnnnnnnnnnnnnnnnnnnnnnnnnnnnnnnnnnnnnnnnnnnnnnnnnnnnnnnnnnnnnnnnnnnnnnnnnnnnnnnnnnnnnnnnnnnnnnnnnnnnnnnnnnnnnnnnnnnnnnnnnnnnnnnnnnnnnnnnnnnnnnnnnnnnnnnnnnnnnnnnnnnnnnnnnnnnnnnnnnnnnnnnnnnnnnnnnnnnnnnnnnnnnnnnnnnnnnnnnnnnnnnnnnnnnnnnnnnnnnnnnnnnnnnnnnnnnnnnnnnnnnnnnnnnnnnnnnnnnnnnnnnnnnnnnnnnnnnnnnnnnnnnnnnnnnnnnnnnnnnnnnnnnnnnnnnnnnnnnnnnnnnnnnnnnnnnnnnnnnnnnnnnnnnnnnnnnnnnnnnnnnnnnnnnnnnnnnnnnnnnnnnnnnnnnnnnnnnnnnnnnnnnnnnnnnnnnnnnnnnnnnnnnnnnnnnnnnnnnnnnnnnnnnnnnnnnnnnnnnnnnnnnnnnnnnnnnnnnnnnnnnnnnnnnnnnnnnnnnnnnnnnnnnnnnnnnnnnnnnnnnnnnnnnnnnnnnnnnnnnnnnnnnnnnnnnnnnnnnnnnnnnnnnnnnnnnnnnnnnnnnnnnnnnnnnnnnnnnnnnnnnnnnnnnnnnnnnnnnnnnnnnnnnnnnnnnnnnnnnnnnnnnnnnnnnnnnnnnnnnnnnnnnnnnnnnnnnnnnnnnnnnnnnnnnnnnnnnnnnnnnnnnnnnnnnnnnnnnnnnnnnnnnnnnnnnnnnnnnnnnnnnnnnnnnnnnnnnnnnnnnnnnnnnnnnnnnnnnnnnnnnnnnnnnnnnnnnnnnnnnnnnnnnnnnnnnnnnnnnnnnnnnnnnnnnnnnnnnnnnnnnnnnnnnnnnnnnnnnnnnnnnnnnnnnnnnnnnnnnnnnnnnnnnnnnnnnnnnnnnnnnnnnnnnnnnnnnnnnnnnnnnnnnnnnnnnnnnnnnnnnnnnnnnnnnnnnnnnnnnnnnnnnnnnnnnnnnnnnnnnnnnnnnnnnnnnnnnnnnnnnnnnnnnnnnnnnnnnnnnnnnnnnnnnnnnnnnnnnnnnnnnnnnnnnnnnnnnnnnnnnnnnnnnnnnnnnnnnnnnnnnnnnnnnnnnnnnnnnnnnnnnnnnnnnnnnnnnnnnnnnnnnnnnnnnnnnnnnnnnnnnnnnnnnnnnnnnnnnnnnnnnnnnnnnnnnnnnnnnnnnnnnnnnnnnnnnnnnnnnnnnnnnnnnnnnnnnnnnnnnnnnnnnnnnnnnnnnnnnnnnnnnnnnnnnnnnnnnnnnnnnnnnnnnnnnnnnnnnnnnnnnnnnnnnnnnnnnnnnnnnnnnnnnnnnnnnnnnnnnnnnnnnnnnnnnnnnnnnnnnnnnnnnnnnnnnnnnnnnnnnnnnnnnnnnnnnnnnnnnnnnnnnnnnnnnnnnnnnnnnnnnnnnnnnnnnnnnnnnnnnnnnnnnnnnnnnnnnnnnnnnnnnnnnnnnnnnnnnnnnnnnnnnnnnnnnnnnnnnnnnnnnnnnnnnnnnnnnnnnnnnnnnnnnnnnnnnnnnnnnnnnnnnnnnnnnnnnnnnnnnnnnnnnnnnnnnnnnnnnnnnnnnnnnnnnnnnnnnnnnnnnnnnnnnnnnnnnnnnnnnnnnnnnnnnnnnnnnnnnnnnnnnnnnnnnnnnnnnnnnnnnnnnnnnnnnnnnnnnnnnnnnnnnnnnnnnnnnnnnnnnnnnnnnnnnnnnnnnnnnnnnnnnnnnnnnnnnnnnnnnnnnnnnnnnnnnnnnnnnnnnnnnnnnnnnnnnnnnnnnnnnnnnnnnnnnnnnnnnnnnnnnnnnnnnnnnnnnnnnnnnnnnnnnnnnnnnnnnnnnnnnnnnnnnnnnnnnnnnnnnnnnnnnnnnnnnnnnnnnnnnnnnnnnnnnnnnnnnnnnnnnnnnnnnnnnnnnnnnnnnnnnnnnnnnnnnnnnnnnnnnnnnnnnnnnnnnnnnnnnnnnnnnnnnnnnnnnnnnnnnnnnnnnnnnnnnnnnnnnnnnnnnnnnnnnnnnnnnnnnnnnnnnnnnnnnnnnnnnnnnnnnnnnnnnnnnnnnnnnnnnnnnnnnnnnnnnnnnnnnnnnnnnnnnnnnnnnnnnnnnnnnnnnnnnnnnnnnnnnnnnnnnnnnnnnnnnnnnnnnnnnnnnnnnnnnnnnnnnnnnnnnnnnnnnnnnnnnnnnnnnnnnnnnnnnnnnnnnnnnnnnnnnnnnnnnnnnnnnnnnnnnnnnnnnnnnnnnnnnnnnnnnnnnnnnnnnnnnnnnnnnnnnnnnnnnnnnnnnnnnnnnnnnnnnnnnnnnnnnnnnnnnnnnnnnnnnnnnnnnnnnnnnnnnnnnnnnnnnnnnnnnnnnnnnnnnnnnnnnnnnnnnnnnnnnnnnnnnnnnnnnnnnnnnnnnnnnnnnnnnnnnnnnnnnnnnnnnnnnnnnnnnnnnnnnnnnnnnnnnnnnnnnnnnnnnnnnnnnnnnnnnnnnnnnnnnnnnnnnnnnnnnnnnnnnnnnnnnnnnnnnnnnnnnnnnnnnnnnnnnnnnnnnnnnnnnnnnnnnnnnnnnnnnnnnnnnnnnnnnnnnnnnnnnnnnnnnnnnnnnnnnnnnnnnnnnnnnnnnnnnnnnnnnnnnnnnnnnnnnnnnnnnnnnnnnnnnnnnnnnnnnnnnnnnnnnnnnnnnnnnnnnnnnnnnnnnnnnnnnnnnnnnnnnnnnnnnnnnnnnnnnnnnnnnnnnnnnnnnnnnnnnnnnnnnnnnnnnnnnnnnnnnnnnnnnnnnnnnnnnnnnnnnnnnnnnnnnnnnnnnnnnnnnnnnnnnnnnnnnnnnnnnnnnnnnnnnnnnnnnnnnnnnnnnnnnnnnnnnnnnnnnnnnnnnnnnnnnnnnnnnnnnnnnnnnnnnnnnnnnnnnnnnnnnnnnnnnnnnnnnnnnnnnnnnnnnnnnnnnnnnnnnnnnnnnnnnnnnnnnnnnnnnnnnnnnnnnnnnnnnnnnnnnnnnnnnnnnnnnnnnnnnnnnnnnnnnnnnnnnnnnnnnnnnnnnnnnnnnnnnnnnnnnnnnnnnnnnnnnnnnnnnnnnnnnnnnnnnnnnnnnnnnnnnnnnnnnnnnnnnnnnnnnnnnnnnnnnnnnnnnnnnnnnnnnnnnnnnnnnnnnnnnnnnnnnnnnnnnnnnnnnnnnnnnnnnnnnnnnnnnnnnnnnnnnnnnnnnnnnnnnnnnnnnnnnnnnnnnnnnnnnnnnnnnnnnnnnnnnnnnnnnnnnnnnnnnnnnnnnnnnnnnnnnnnnnnnnnnnnnnnnnnnnnnnnnnnnnnnnnnnnnnnnnnnnnnnnnnnnnnnnnnnnnnnnnnnnnnnnnnnnnnnnnnnnnnnnnnnnnnnnnnnnnnnnnnnnnnnnnnnnnnnnnnnnnnnnnnnnnnnnnnnnnnnnnnnnnnnnnnnnnnnnnnnnnnnnnnnnnnnnnnnnnnnnnnnnnnnnnnnnnnnnnnnnnnnnnnnnnnnnnnnnnnnnnnnnnnnnnnnnnnnnnnnnnnnnnnnnnnnnnnnnnnnnnnnnnnnnnnnnnnnnnnnnnnnnnnnnnnnnnnnnnnnnnnnnnnnnnnnnnnnnnnnnnnnnnnnnnnnnnnnnnnnnnnnnnnnnnnnnnnnnnnnnnnnnnnnnnnnnnnnnnnnnnnnnnnnnnnnnnnnnnnnnnnnnnnnnnnnnnnnnnnnnnnnnnnnnnnnnnnnnnnnnnnnnnnnnnnnnnnnnnnnnnnnnnnnnnnnnnnnnnnnnnnnnnnnnnnnnnnnnnnnnnnnnnnnnnnnnnnnnnnnnnnnnnnnnnnnnnnnnnnnnnnnnnnnnnnnnnnnnnnnnnnnnnnnnnnnnnnnnnnnnnnnnnnnnnnnnnnnnnnnnnnnnnnnnnnnnnnnnnnnnnnnnnnnnnnnnnnnnnnnnnnnnnnnnnnnnnnnnnnnnnnnnnnnnnnnnnnnnnnnnnnnnnnnnnnnnnnnnnnnnnnnnnnnnnnnnnnnnnnnnnnnnnnnnnnnnnnnnnnnnnnnnnnnnnnnnnnnnnnnnnnnnnnnnnnnnnnnnnnnnnnnnnnnnnnnnnnnnnnnnnnnnnnnnnnnnnnnnnnnnnnnnnnnnnnnnnnnnnnnnnnnnnnnnnnnnnnnnnnnnnnnnnnnnnnnnnnnnnnnnnnnnnnnnnnnnnnnnnnnnnnnnnnnnnnnnnnnnnnnnnnnnnnnnnnnnnnnnnnnnnnnnnnnnnnnnnnnnnnnnnnnnnnnnnnnnnnnnnnnnnnnnnnnnnnnnnnnnnnnnnnnnnnnnnnnnnnnnnnnnnnnnnnnnnnnnnnnnnnnnnnnnnnnnnnnnnnnnnnnnnnnnnnnnnnnnnnnnnnnnnnnnnnnnnnnnnnnnnnnnnnnnnnnnnnnnnnnnnnnnnnnnnnnnnnnnnnnnnnnnnnnnnnnnnnnnnnnnnnnnnnnnnnnnnnnnnnnnnnnnnnnnnnnnnnnnnnnnnnnnnnnnnnnnnnnnnnnnnnnnnnnnnnnnnnnnnnnnnnnnnnnnnnnnnnnnnnnnnnnnnnnnnnnnnnnnnnnnnnnnnnnnnnnnnnnnnnnnnnnnnnnnnnnnnnnnnnnnnnnnnnnnnnnnnnnnnnnnnnnnnnnnnnnnnnnnnnnnnnnnnnnnnnnnnnnnnnnnnnnnnnnnnnnnnnnnnnnnnnnnnnnnnnnnnnnnnnnnnnnnnnnnnnnnnnnnnnnnnnnnnnnnnnnnnnnnnnnnnnnnnnnnnnnnnnnnnnnnnnnnnnnnnnnnnnnnnnnnnnnnnnnnnnnnnnnnnnnnnnnnnnnnnnnnnnnnnnnnnnnnnnnnnnnnnnnnnnnnnnnnnnnnnnnnnnnnnnnnnnnnnnnnnnnnnnnnnnnnnnnnnnnnnnnnnnnnnnnnnnnnnnnnnnnnnnnnnnnnnnnnnnnnnnnnnnnnnnnnnnnnnnnnnnnnnnnnnnnnnnnnnnnnnnnnnnnnnnnnnnnnnnnnnnnnnnnnnnnnnnnnnnnnnnnnnnnnnnnnnnnnnnnnnnnnnnnnnnnnnnnnnnnnnnnnnnnnnnnnnnnnnnnnnnnnnnnnnnnnnnnnnnnnnnnnnnnnnnnnnnnnnnnnnnnnnnnnnnnnnnnnnnnnnnnnnnnnnnnnnnnnnnnnnnnnnnnnnnnnnnnnnnnnnnnnnnnnnnnnnnnnnnnnnnnnnnnnnnnnnnnnnnnnnnnnnnnnnnnnnnnnnnnnnnnnnnnnnnnnnnnnnnnnnnnnnnnnnnnnnnnnnnnnnnnnnnnnnnnnnnnnnnnnnnnnnnnnnnnnnnnnnnnnnnnnnnnnnnnnnnnnnnnnnnnnnnnnnnnnnnnnnnnnnnnnnnnnnnnnnnnnnnnnnnnnnnnnnnnnnnnnnnnnnnnnnnnnnnnnnnnnnnnnnnnnnnnnnnnnnnnnnnnnnnnnnnnnnnnnnnnnnnnnnnnnnnnnnnnnnnnnnnnnnnnnnnnnnnnnnnnnnnnnnnnnnnnnnnnnnnnnnnnnnnnnnnnnnnnnnnnnnnnnnnnnnnnnnnnnnnnnnnnnnnnnnnnnnnnnnnnnnnnnnnnnnnnnnnnnnnnnnnnnnnnnnnnnnnnnnnnnnnnnnnnnnnnnnnnnnnnnnnnnnnnnnnnnnnnnnnnnnnnnnnnnnnnnnnnnnnnnnnnnnnnnnnnnnnnnnnnnnnnnnnnnnnnnnnnnnnnnnnnnnnnnnnnnnnnnnnnnnnnnnnnnnnnnnnnnnnnnnnnnnnnnnnnnnnnnnnnnnnnnnnnnnnnnnnnnnnnnnnnnnnnnnnnnnnnnnnnnnnnnnnnnnnnnnnnnnnnnnnnnnnnnnnnnnnnnnnnnnnnnnnnnnnnnnnnnnnnnnnnnnnnnnnnnnnnnnnnnnnnnnnnnnnnnnnnnnnnnnnnnnnnnnnnnnnnnnnnnnnnnnnnnnnnnnnnnnnnnnnnnnnnnnnnnnnnnnnnnnnnnnnnnnnnnnnnnnnnnnnnnnnnnnnnnnnnnnnnnnnnnnnnnnnnnnnnnnnnnnnnnnnnnnnnnnnnnnnnnnnnnnnnnnnnnnnnnnnnnnnnnnnnnnnnnnnnnnnnnnnnnnnnnnnnnnnnnnnnnnnnnnnnnnnnnnnnnnnnnnnnnnnnnnnnnnnnnnnnnnnnnnnnnnnnnnnnnnnnnnnnnnnnnnnnnnnnnnnnnnnnnnnnnnnnnnnnnnnnnnnnnnnnnnnnnnnnnnnnnnnnnnnnnnnnnnnnnnnnnnnnnnnnnnnnnnnnnnnnnnnnnnnnnnnnnnnnnnnnnnnnnnnnnnnnnnnnnnnnnnnnnnnnnnnnnnnnnnnnnnnnnnnnnnnnnnnnnnnnnnnnnnnnnnnnnnnnnnnnnnnnnnnnnnnnnnnnnnnnnnnnnnnnnnnnnnnnnnnnnnnnnnnnnnnnnnnnnnnnnnnnnnnnnnnnnnnnnnnnnnnnnnnnnnnnnnnnnnnnnnnnnnnnnnnnnnnnnnnnnnnnnnnnnnnnnnnnnnnnnnnnnnnnnnnnnnnnnnnnnnnnnnnnnnnnnnnnnnnnnnnnnnnnnnnnnnnnnnnnnnnnnnnnnnnnnnnnnnnnnnnnnnnnnnnnnnnnnnnnnnnnnnnnnnnnnnnnnnnnnnnnnnnnnnnnnnnnnnnnnnnnnnnnnnnnnnnnnnnnnnnnnnnnnnnnnnnnnnnnnnnnnnnnnnnnnnnnnnnnnnnnnnnnnnnnnnnnnnnnnnnnnnnnnnnnnnnnnnnnnnnnnnnnnnnnnnnnnnnnnnnnnnnnnnnnnnnnnnnnnnnnnnnnnnnnnnnnnnnnnnnnnnnnnnnnnnnnnnnnnnnnnnnnnnnnnnnnnnnnnnnnnnnnnnnnnnnnnnnnnnnnnnnnnnnnnnnnnnnnnnnnnnnnnnnnnnnnnnnnnnnnnnnnnnnnnnnnnnnnnnnnnnnnnnnnnnnnnnnnnnnnnnnnnnnnnnnnnnnnnnnnnnnnnnnnnnnnnnnnnnnnnnnnnnnnnnnnnnnnnnnnnnnnnnnnnnnnnnnnnnnnnnnnnnnnnnnnnnnnnnnnnnnnnnnnnnnnnnnnnnnnnnnnnnnnnnnnnnnnnnnnnnnnnnnnnnnnnnnnnnnnnnnnnnnnnnnnnnnnnnnnnnnnnnnnnnnnnnnnnnnnnnnnnnnnnnnnnnnnnnnnnnnnnnnnnnnnnnnnnnnnnnnnnnnnnnnnnnnnnnnnnnnnnnnnnnnnnnnnnnnnnnnnnnnnnnnnnnnnnnnnnnnnnnnnnnnnnnnnnnnnnnnnnnnnnnnnnnnnnnnnnnnnnnnnnnnnnnnnnnnnnnnnnnnnnnnnnnnnnnnnnnnnnnnnnnnnnnnnnnnnnnnnnnnnnnnnnnnnnnnnnnnnnnnnnnnnnnnnnnnnnnnnnnnnnnnnnnnnnnnnnnnnnnnnnnnnnnnnnnnnnnnnnnnnnnnnnnnnnnnnnnnnnnnnnnnnnnnnnnnnnnnnnnnnnnnnnnnnnnnnnnnnnnnnnnnnnnnnnnnnnnnnnnnnnnnnnnnnnnnnnnnnnnnnnnnnnnnnnnnnnnnnnnnnnnnnnnnnnnnnnnnnnnnnnnnnnnnnnnnnnnnnnnnnnnnnnnnnnnnnnnnnnnnnnnnnnnnnnnnnnnnnnnnnnnnnnnnnnnnnnnnnnnnnnnnnnnnnnnnnnnnnnnnnnnnnnnnnnnnnnnnnnnnnnnnnnnnnnnnnnnnnnnnnnnnnnnnnnnnnnnnnnnnnnnnnnnnnnnnnnnnnnnnnnnnnnnnnnnnnnnnnnnnnnnnnnnnnnnnnnnnnnnnnnnnnnnnnnnnnnnnnnnnnnnnnnnnnnnnnnnnnnnnnnnnnnnnnnnnnnnnnnnnnnnnnnnnnnnnnnnnnnnnnnnnnnnnnnnnnnnnnnnnnnnnnnnnnnnnnnnnnnnnnnnnnnnnnnnnnnnnnnnnnnnnnnnnnnnnnnnnnnnnnnnnnnnnnnnnnnnnnnnnnnnnnnnnnnnnnnnnnnnnnnnnnnnnnnnnnnnnnnnnnnnnnnnnnnnnnnnnnnnnnnnnnnnnnnnnnnnnnnnnnnnnnnnnnnnnnnnnnnnnnnnnnnnnnnnnnnnnnnnnnnnnnnnnnnnnnnnnnnnnnnnnnnnnnnnnnnnnnnnnnnnnnnnnnnnnnnnnnnnnnnnnnnnnnnnnnnnnnnnnnnnnnnnnnnnnnnnnnnnnnnnnnnnnnnnnnnnnnnnnnnnnnnnnnnnnnnnnnnnnnnnnnnnnnnnnnnnnnnnnnnnnnnnnnnnnnnnnnnnnnnnnnnnnnnnnnnnnnnnnnnnnnnnnnnnnnnnnnnnnnnnnnnnnnnnnnnnnnnnnnnnnnnnnnnnnnnnnnnnnnnnnnnnnnnnnnnnnnnnnnnnnnnnnnnnnnnnnnnnnnnnnnnnnnnnnnnnnnnnnnnnnnnnnnnnnnnnnnnnnnnnnnnnnnnnnnnnnnnnnnnnnnnnnnnnnnnnnnnnnnnnnnnnnnnnnnnnnnnnnnnnnnnnnnnnnnnnnnnnnnnnnnnnnnnnnnnnnnnnnnnnnnnnnnnnnnnnnnnnnnnnnnnnnnnnnnnnnnnnnnnnnnnnnnnnnnnnnnnnnnnnnnnnnnnnnnnnnnnnnnnnnnnnnnnnnnnnnnnnnnnnnnnnnnnnnnnnnnnnnnnnnnnnnnnnnnnnnnnnnnnnnnnnnnnnnnnnnnnnnnnnnnnnnnnnnnnnnnnnnnnnnnnnnnnnnnnnnnnnnnnnnnnnnnnnnnnnnnnnnnnnnnnnnnnnnnnnnnnnnnnnnnnnnnnnnnnnnnnnnnnnnnnnnnnnnnnnnnnnnnnnnnnnnnnnnnnnnnnnnnnnnnnnnnnnnnnnnnnnnnnnnnnnnnnnnnnnnnnnnnnnnnnnnnnnnnnnnnnnnnnnnnnnnnnnnnnnnnnnnnnnnnnnnnnnnnnnnnnnnnnnnnnnnnnnnnnnnnnnnnnnnnnnnnnnnnnnnnnnnnnnnnnnnnnnnnnnnnnnnnnnnnnnnnnnnnnnnnnnnnnnnnnnnnnnnnnnnnnnnnnnnnnnnnnnnnnnnnnnnnnnnnnnnnnnnnnnnnnnnnnnnnnnnnnnnnnnnnnnnnnnnnnnnnnnnnnnnnnnnnnnnnnnnnnnnnnnnnnnnnnnnnnnnnnnnnnnnnnnnnnnnnnnnnnnnnnnnnnnnnnnnnnnnnnnnnnnnnnnnnnnnnnnnnnnnnnnnnnnnnnnnnnnnnnnnnnnnnnnnnnnnnnnnnnnnnnnnnnnnnnnnnnnnnnnnnnnnnnnnnnnnnnnnnnnnnnnnnnnnnnnnnnnnnnnnnnnnnnnnnnnnnnnnnnnnnnnnnnnnnnnnnnnnnnnnnnnnnnnnnnnnnnnnnnnnnnnnnnnnnnnnnnnnnnnnnnnnnnnnnnnnnnnnnnnnnnnnnnnnnnnnnnnnnnnnnnnnnnnnnnnnnnnnnnnnnnnnnnnnnnnnnnnnnnnnnnnnnnnnnnnnnnnnnnnnnnnnnnnnnnnnnnnnnnnnnnnnnnnnnnnnnnnnnnnnnnnnnnnnnnnnnnnnnnnnnnnnnnnnnnnnnnnnnnnnnnnnnnnnnnnnnnnnnnnnnnnnnnnnnnnnnnnnnnnnnnnnnnnnnnnnnnnnnnnnnnnnnnnnnnnnnnnnnnnnnnnnnnnnnnnnnnnnnnnnnnnnnnnnnnnnnnnnnnnnnnnnnnnnnnnnnnnnnnnnnnnnnnnnnnnnnnnnnnnnnnnnnnnnnnnnnnnnnnnnnnnnnnnnnnnnnnnnnnnnnnnnnnnnnnnnnnnnnnnnnnnnnnnnnnnnnnnnnnnnnnnnnnnnnnnnnnnnnnnnnnnnnnnnnnnnnnnnnnnnnnnnnnnnnnnnnnnnnnnnnnnnnnnnnnnnnnnnnnnnnnnnnnnnnnnnnnnnnnnnnnnnnnnnnnnnnnnnnnnnnnnnnnnnnnnnnnnnnnnnnnnnnnnnnnnnnnnnnnnnnnnnnnnnnnnnnnnnnnnnnnnnnnnnnnnnnnnnnnnnnnnnnnnnnnnnnnnnnnnnnnnnnnnnnnnnnnnnnnnnnnnnnnnnnnnnnnnnnnnnnnnnnnnnnnnnnnnnnnnnnnnnnnnnnnnnnnnnnnnnnnnnnnnnnnnnnnnnnnnnnnnnnnnnnnnnnnnnnnnnnnnnnnnnnnnnnnnnnnnnnnnnnnnnnnnnnnnnnnnnnnnnnnnnnnnnnnnnnnnnnnnnnnnnnnnnnnnnnnnnnnnnnnnnnnnnnnnnnnnnnnnnnnnnnnnnnnnnnnnnnnnnnnnnnnnnnnnnnnnnnnnnnnnnnnnnnnnnnnnnnnnnnnnnnnnnnnnnnnnnnnnnnnnnnnnnnnnnnnnnnnnnnnnnnnnnnnnnnnnnnnnnnnnnnnnnnnnnnnnnnnnnnnnnnnnnnnnnnnnnnnnnnnnnnnnnnnnnnnnnnnnnnnnnnnnnnnnnnnnnnnnnnnnnnnnnnnnnnnnnnnnnnnnnnnnnnnnnnnnnnnnnnnnnnnnnnnnnnnnnnnnnnnnnnnnnnnnnnnnnnnnnnnnnnnnnnnnnnnnnnnnnnnnnnnnnnnnnnnnnnnnnnnnnnnnnnnnnnnnnnnnnnnnnnnnnnnnnnnnnnnnnnnnnnnnnnnnnnnnnnnnnnnnnnnnnnnnnnnnnnnnnnnnnnnnnnnnnnnnnnnnnnnnnnnnnnnnnnnnnnnnnnnnnnnnnnnnnnnnnnnnnnnnnnnnnnnnnnnnnnnnnnnnnnnnnnnnnnnnnnnnnnnnnnnnnnnnnnnnnnnnnnnnnnnnnnnnnnnnnnnnnnnnnnnnnnnnnnnnnnnnnnnnnnnnnnnnnnnnnnnnnnnnnnnnnnnnnnnnnnnnnnnnnnnnnnnnnnnnnnnnnnnnnnnnnnnnnnnnnnnnnnnnnnnnnnnnnnnnnnnnnnnnnnnnnnnnnnnnnnnnnnnnnnnnnnnnnnnnnnnnnnnnnnnnnnnnnnnnnnnnnnnnnnnnnnnnnnnnnnnnnnnnnnnnnnnnnnnnnnnnnnnnnnnnnnnnnnnnnnnnnnnnnnnnnnnnnnnnnnnnnnnnnnnnnnnnnnnnnnnnnnnnnnnnnnnnnnnnnnnnnnnnnnnnnnnnnnnnnnnnnnnnnnnnnnnnnnnnnnnnnnnnnnnnnnnnnnnnnnnnnnnnnnnnnnnnnnnnnnnnnnnnnnnnnnnnnnnnnnnnnnnnnnnnnnnnnnnnnnnnnnnnnnnnnnnnnnnnnnnnnnnnnnnnnnnnnnnnnnnnnnnnnnnnnnnnnnnnnnnnnnnnnnnnnnnnnnnnnnnnnnnnnnnnnnnnnnnnnnnnnnnnnnnnnnnnnnnnnnnnnnnnnnnnnnnnnnnnnnnnnnnnnnnnnnnnnnnnnnnnnnnnnnnnnnnnnnnnnnnnnnnnnnnnnnnnnnnnnnnnnnnnnnnnnnnnnnnnnnnnnnnnnnnnnnnnnnnnnnnnnnnnnnnnnnnnnnnnnnnnnnnnnnnnnnnnnnnnnnnnnnnnnnnnnnnnnnnnnnnnnnnnnnnnnnnnnnnnnnnnnnnnnnnnnnnnnnnnnnnnnnnnnnnnnnnnnnnnnnnnnnnnnnnnnnnnnnnnnnnnnnnnnnnnnnnnnnnnnnnnnnnnnnnnnnnnnnnnnnnnnnnnnnnnnnnnnnnnnnnnnnnnnnnnnnnnnnnnnnnnnnnnnnnnnnnnnnnnnnnnnnnnnnnnnnnnnnnnnnnnnnnnnnnnnnnnnnnnnnnnnnnnnnnnnnnnnnnnnnnnnnnnnnnnnnnnnnnnnnnnnnnnnnnnnnnnnnnnnnnnnnnnnnnnnnnnnnnnnnnnnnnnnnnnnnnnnnnnnnnnnnnnnnnnnnnnnnnnnnnnnnnnnnnnnnnnnnnnnnnnnnnnnnnnnnnnnnnnnnnnnnnnnnnnnnnnnnnnnnnnnnnnnnnnnnnnnnnnnnnnnnnnnnnnnnnnnnnnnnnnnnnnnnnnnnnnnnnnnnnnnnnnnnnnnnnnnnnnnnnnnnnnnnnnnnnnnnnnnnnnnnnnnnnnnnnnnnnnnnnnnnnnnnnnnnnnnnnnnnnnnnnnnnnnnnnnnnnnnnnnnnnnnnnnnnnnnnnnnnnnnnnnnnnnnnnnnnnnnnnnnnnnnnnnnnnnnnnnnnnnnnnnnnnnnnnnnnnnnnnnnnnnnnnnnnnnnnnnnnnnnnnnnnnnnnnnnnnnnnnnnnnnnnnnnnnnnnnnnnnnnnnnnnnnnnnnnnnnnnnnnnnnnnnnnnnnnnnnnnnnnnnnnnnnnnnnnnnnnnnnnnnnnnnnnnnnnnnnnnnnnnnnnnnnnnnnnnnnnnnnnnnnnnnnnnnnnnnnnnnnnnnnnnnnnnnnnnnnnnnnnnnnnnnnnnnnnnnnnnnnnnnnnnnnnnnnnnnnnnnnnnnnnnnnnnnnnnnnnnnnnnnnnnnnnnnnnnnnnnnnnnnnnnnnnnnnnnnnnnnnnnnnnnnnnnnnnnnnnnnnnnnnnnnnnnnnnnnnnnnnnnnnnnnnnnnnnnnnnnnnnnnnnnnnnnnnnnnnnnnnnnnnnnnnnnnnnnnnnnnnnnnnnnnnnnnnnnnnnnnnnnnnnnnnnnnnnnnnnnnnnnnnnnnnnnnnnnnnnnnnnnnnnnnnnnnnnnnnnnnnnnnnnnnnnnnnnnnnnnnnnnnnnnnnnnnnnnnnnnnnnnnnnnnnnnnnnnnnnnnnnnnnnnnnnnnnnnnnnnnnnnnnnnnnnnnnnnnnnnnnnnnnnnnnnnnnnnnnnnnnnnnnnnnnnnnnnnnnnnnnnnnnnnnnnnnnnnnnnnnnnnnnnnnnnnnnnnnnnnnnnnnnnnnnnnnnnnnnnnnnnnnnnnnnnnnnnnnnnnnnnnnnnnnnnnnnnnnnnnnnnnnnnnnnnnnnnnnnnnnnnnnnnnnnnnnnnnnnnnnnnnnnnnnnnnnnnnnnnnnnnnnnnnnnnnnnnnnnnnnnnnnnnnnnnnnnnnnnnnnnnnnnnnnnnnnnnnnnnnnnnnnnnnnnnnnnnnnnnnnnnnnnnnnnnnnnnnnnnnnnnnnnnnnnnnnnnnnnnnnnnnnnnnnnnnnnnnnnnnnnnnnnnnnnnnnnnnnnnnnnnnnnnnnnnnnnnnnnnnnnnnnnnnnnnnnnnnnnnnnnnnnnnnnnnnnnnnnnnnnnnnnnnnnnnnnnnnnnnnnnnnnnnnnnnnnnnnnnnnnnnnnnnnnnnnnnnnnnnnnnnnnnnnnnnnnnnnnnnnnnnnnnnnnnnnnnnnnnnnnnnnnnnnnnnnnnnnnnnnnnnnnnnnnnnnnnnnnnnnnnnnnnnnnnnnnnnnnnnnnnnnnnnnnnnnnnnnnnnnnnnnnnnnnnnnnnnnnnnnnnnnnnnnnnnnnnnnnnnnnnnnnnnnnnnnnnnnnnnnnnnnnnnnnnnnnnnnnnnnnnnnnnnnnnnnnnnnnnnnnnnnnnnnnnnnnnnnnnnnnnnnnnnnnnnnnnnnnnnnnnnnnnnnnnnnnnnnnnnnnnnnnnnnnnnnnnnnnnnnnnnnnnnnnnnnnnnnnnnnnnnnnnnnnnnnnnnnnnnnnnnnnnnnnnnnnnnnnnnnnnnnnnnnnnnnnnnnnnnnnnnnnnnnnnnnnnnnnnnnnnnnnnnnnnnnnnnnnnnnnnnnnnnnnnnnnnnnnnnnnnnnnnnnnnnnnnnnnnnnnnnnnnnnnnnnnnnnnnnnnnnnnnnnnnnnnnnnnnnnnnnnnnnnnnnnnnnnnnnnnnnnnnnnnnnnnnnnnnnnnnnnnnnnnnnnnnnnnnnnnnnnnnnnnnnnnnnnnnnnnnnnnnnnnnnnnnnnnnnnnnnnnnnnnnnnnnnnnnnnnnnnnnnnnnnnnnnnnnnnnnnnnnnnnnnnnnnnnnnnnnnnnnnnnnnnnnnnnnnnnnnnnnnnnnnnnnnnnnnnnnnnnnnnnnnnnnnnnnnnnnnnnnnnnnnnnnnnnnnnnnnnnnnnnnnnnnnnnnnnnnnnnnnnnnnnnnnnnnnnnnnnnnnnnnnnnnnnnnnnnnnnnnnnnnnnnnnnnnnnnnnnnnnnnnnnnnnnnnnnnnnnnnnnnnnnnnnnnnnnnnnnnnnnnnnnnnnnnnnnnnnnnnnnnnnnnnnnnnnnnnnnnnnnnnnnnnnnnnnnnnnnnnnnnnnnnnnnnnnnnnnnnnnnnnnnnnnnnnnnnnnnnnnnnnnnnnnnnnnnnnnnnnnnnnnnnnnnnnnnnnnnnnnnnnnnnnnnnnnnnnnnnnnnnnnnnnnnnnnnnnnnnnnnnnnnnnnnnnnnnnnnnnnnnnnnnnnnnnnnnnnnnnnnnnnnnnnnnnnnnnnnnnnnnnnnnnnnnnnnnnnnnnnnnnnnnnnnnnnnnnnnnnnnnnnnnnnnnnnnnnnnnnnnnnnnnnnnnnnnnnnnnnnnnnnnnnnnnnnnnnnnnnnnnnnnnnnnnnnnnnnnnnnnnnnnnnnnnnnnnnnnnnnnnnnnnnnnnnnnnnnnnnnnnnnnnnnnnnnnnnnnnnnnnnnnnnnnnnnnnnnnnnnnnnnnnnnnnnnnnnnnnnnnnnnnnnnnnnnnnnnnnnnnnnnnnnnnnnnnnnnnnnnnnnnnnnnnnnnnnnnnnnnnnnnnnnnnnnnnnnnnnnnnnnnnnnnnnnnnnnnnnnnnnnnnnnnnnnnnnnnnnnnnnnnnnnnnnnnnnnnnnnnnnnnnnnnnnnnnnnnnnnnnnnnnnnnnnnnnnnnnnnnnnnnnnnnnnnnnnnnnnnnnnnnnnnnnnnnnnnnnnnnnnnnnnnnnnnnnnnnnnnnnnnnnnnnnnnnnnnnnnnnnnnnnnnnnnnnnnnnnnnnnnnnnnnnnnnnnnnnnnnnnnnnnnnnnnnnnnnnnnnnnnnnnnnnnnnnnnnnnnnnnnnnnnnnnnnnnnnnnnnnnnnnnnnnnnnnnnnnnnnnnnnnnnnnnnnnnnnnnnnnnnnnnnnnnnnnnnnnnnnnnnnnnnnnnnnnnnnnnnnnnnnnnnnnnnnnnnnnnnnnnnnnnnnnnnnnnnnnnnnnnnnnnnnnnnnnnnnnnnnnnnnnnnnnnnnnnnnnnnnnnnnnnnnnnnnnnnnnnnnnnnnnnnnnnnnnnnnnnnnnnnnnnnnnnnnnnnnnnnnnnnnnnnnnnnnnnnnnnnnnnnnnnnnnnnnnnnnnnnnnnnnnnnnnnnnnnnnnnnnnnnnnnnnnnnnnnnnnnnnnnnnnnnnnnnnnnnnnnnnnnnnnnnnnnnnnnnnnnnnnnnnnnnnnnnnnnnnnnnnnnnnnnnnnnnnnnnnnnnnnnnnnnnnnnnnnnnnnnnnnnnnnnnnnnnnnnnnnnnnnnnnnnnnnnnnnnnnnnnnnnnnnnnnnnnnnnnnnnnnnnnnnnnnnnnnnnnnnnnnnnnnnnnnnnnnnnnnnnnnnnnnnnnnnnnnnnnnnnnnnnnnnnnnnnnnnnnnnnnnnnnnnnnnnnnnnnnnnnnnnnnnnnnnnnnnnnnnnnnnnnnnnnnnnnnnnnnnnnnnnnnnnnnnnnnnnnnnnnnnnnnnnnnnnnnnnnnnnnnnnnnnnnnnnnnnnnnnnnnnnnnnnnnnnnnnnnnnnnnnnnnnnnnnnnnnnnnnnnnnnnnnnnnnnnnnnnnnnnnnnnnnnnnnnnnnnnnnnnnnnnnnnnnnnnnnnnnnnnnnnnnnnnnnnnnnnnnnnnnnnnnnnnnnnnnnnnnnnnnnnnnnnnnnnnnnnnnnnnnnnnnnnnnnnnnnnnnnnnnnnnnnnnnnnnnnnnnnnnnnnnnnnnnnnnnnnnnnnnnnnnnnnnnnnnnnnnnnnnnnnnnnnnnnnnnnnnnnnnnnnnnnnnnnnnnnnnnnnnnnnnnnnnnnnnnnnnnnnnnnnnnnnnnnnnnnnnnnnnnnnnnnnnnnnnnnnnnnnnnnnnnnnnnnnnnnnnnnnnnnnnnnnnnnnnnnnnnnnnnnnnnnnnnnnnnnnnnnnnnnnnnnnnnnnnnnnnnnnnnnnnnnnnnnnnnnnnnnnnnnnnnnnnnnnnnnnnnnnnnnnnnnnnnnnnnnnnnnnnnnnnnnnnnnnnnnnnnnnnnnnnnnnnnnnnnnnnnnnnnnnnnnnnnnnnnnnnnnnnnnnnnnnnnnnnnnnnnnnnnnnnnnnnnnnnnnnnnnnnnnnnnnnnnnnnnnnnnnnnnnnnnnnnnnnnnnnnnnnnnnnnnnnnnnnnnnnnnnnnnnnnnnnnnnnnnnnnnnnnnnnnnnnnnnnnnnnnnnnnnnnnnnnnnnnnnnnnnnnnnnnnnnnnnnnnnnnnnnnnnnnnnnnnnnnnnnnnnnnnnnnnnnnnnnnnnnnnnnnnnnnnnnnnnnnnnnnnnnnnnnnnnnnnnnnnnnnnnnnnnnnnnnnnnnnnnnnnnnnnnnnnnnnnnnnnnnnnnnnnnnnnnnnnnnnnnnnnnnnnnnnnnnnnnnnnnnnnnnnnnnnnnnnnnnnnnnnnnnnnnnnnnnnnnnnnnnnnnnnnnnnnnnnnnnnnnnnnnnnnnnnnnnnnnnnnnnnnnnnnnnnnnnnnnnnnnnnnnnnnnnnnnnnnnnnnnnnnnnnnnnnnnnnnnnnnnnnnnnnnnnnnnnnnnnnnnnnnnnnnnnnnnnnnnnnnnnnnnnnnnnnnnnnnnnnnnnnnnnnnnnnnnnnnnnnnnnnnnnnnnnnnnnnnnnnnnnnnnnnnnnnnnnnnnnnnnnnnnnnnnnnnnnnnnnnnnnnnnnnnnnnnnnnnnnnnnnnnnnnnnnnnnnnnnnnnnnnnnnnnnnnnnnnnnnnnnnnnnnnnnnnnnnnnnnnnnnnnnnnnnnnnnnnnnnnnnnnnnnnnnnnnnnnnnnnnnnnnnnnnnnnnnnnnnnnnnnnnnnnnnnnnnnnnnnnnnnnnnnnnnnnnnnnnnnnnnnnnnnnnnnnnnnnnnnnnnnnnnnnnnnnnnnnnnnnnnnnnnnnnnnnnnnnnnnnnnnnnnnnnnnnnnnnnnnnnnnnnnnnnnnnnnnnnnnnnnnnnnnnnnnnnnnnnnnnnnnnnnnnnnnnnnnnnnnnnnnnnnnnnnnnnnnnnnnnnnnnnnnnnnnnnnnnnnnnnnnnnnnnnnnnnnnnnnnnnnnnnnnnnnnnnnnnnnnnnnnnnnnnnnnnnnnnnnnnnnnnnnnnnnnnnnnnnnnnnnnnnnnnnnnnnnnnnnnnnnnnnnnnnnnnnnnnnnnnnnnnnnnnnnnnnnnnnnnnnnnnnnnnnnnnnnnnnnnnnnnnnnnnnnnnnnnnnnnnnnnnnnnnnnnnnnnnnnnnnnnnnnnnnnnnnnnnnnnnnnnnnnnnnnnnnnnnnnnnnnnnnnnnnnnnnnnnnnnnnnnnnnnnnnnnnnnnnnnnnnnnnnnnnnnnnnnnnnnnnnnnnnnnnnnnnnnnnnnnnnnnnnnnnnnnnnnnnnnnnnnnnnnnnnnnnnnnnnnnnnnnnnnnnnnnnnnnnnnnnnnnnnnnnnnnnnnnnnnnnnnnnnnnnnnnnnnnnnnnnnnnnnnnnnnnnnnnnnnnnnnnnnnnnnnnnnnnnnnnnnnnnnnnnnnnnnnnnnnnnnnnnnnnnnnnnnnnnnnnnnnnnnnnnnnnnnnnnnnnnnnnnnnnnnnnnnnnnnnnnnnnnnnnnnnnnnnnnnnnnnnnnnnnnnnnnnnnnnnnnnnnnnnnnnnnnnnnnnnnnnnnnnnnnnnnnnnnnnnnnnnnnnnnnnnnnnnnnnnnnnnnnnnnnnnnnnnnnnnnnnnnnnnnnnnnnnnnnnnnnnnnnnnnnnnnnnnnnnnnnnnnnnnnnnnnnnnnnnnnnnnnnnnnnnnnnnnnnnnnnnnnnnnnnnnnnnnnnnnnnnnnnnnnnnnnnnnnnnnnnnnnnnnnnnnnnnnnnnnnnnnnnnnnnnnnnnnnnnnnnnnnnnnnnnnnnnnnnnnnnnnnnnnnnnnnnnnnnnnnnnnnnnnnnnnnnnnnnnnnnnnnnnnnnnnnnnnnnnnnnnnnnnnnnnnnnnnnnnnnnnnnnnnnnnnnnnnnnnnnnnnnnnnnnnnnnnnnnnnnnnnnnnnnnnnnnnnnnnnnnnnnnnnnnnnnnnnnnnnnnnnnnnnnnnnnnnnnnnnnnnnnnnnnnnnnnnnnnnnnnnnnnnnnnnnnnnnnnnnnnnnnnnnnnnnnnnnnnnnnnnnnnnnnnnnnnnnnnnnnnnnnnnnnnnnnnnnnnnnnnnnnnnnnnnnnnnnnnnnnnnnnnnnnnnnnnnnnnnnnnnnnnnnnnnnnnnnnnnnnnnnnnnnnnnnnnnnnnnnnnnnnnnnnnnnnnnnnnnnnnnnnnnnnnnnnnnnnnnnnnnnnnnnnnnnnnnnnnnnnnnnnnnnnnnnnnnnnnnnnnnnnnnnnnnnnnnnnnnnnnnnnnnnnnnnnnnnnnnnnnnnnnnnnnnnnnnnnnnnnnnnnnnnnnnnnnnnnnnnnnnnnnnnnnnnnnnnnnnnnnnnnnnnnnnnnnnnnnnnnnnnnnnnnnnnnnnnnnnnnnnnnnnnnnnnnnnnnnnnnnnnnnnnnnnnnnnnnnnnnnnnnnnnnnnnnnnnnnnnnnnnnnnnnnnnnnnnnnnnnnnnnnnnnnnnnnnnnnnnnnnnnnnnnnnnnnnnnnnnnnnnnnnnnnnnnnnnnnnnnnnnnnnnnnnnnnnnnnnnnnnnnnnnnnnnnnnnnnnnnnnnnnnnnnnnnnnnnnnnnnnnnnnnnnnnnnnnnnnnnnnnnnnnnnnnnnnnnnnnnnnnnnnnnnnnnnnnnnnnnnnnnnnnnnnnnnnnnnnnnnnnnnnnnnnnnnnnnnnnnnnnnnnnnnnnnnnnnnnnnnnnnnnnnnnnnnnnnnnnnnnnnnnnnnnnnnnnnnnnnnnnnnnnnnnnnnnnnnnnnnnnnnnnnnnnnnnnnnnnnnnnnnnnnnnnnnnnnnnnnnnnnnnnnnnnnnnnnnnnnnnnnnnnnnnnnnnnnnnnnnnnnnnnnnnnnnnnnnnnnnnnnnnnnnnnnnnnnnnnnnnnnnnnnnnnnnnnnnnnnnnnnnnnnnnnnnnnnnnnnnnnnnnnnnnnnnnnnnnnnnnnnnnnnnnnnnnnnnnnnnnnnnnnnnnnnnnnnnnnnnnnnnnnnnnnnnnnnnnnnnnnnnnnnnnnnnnnnnnnnnnnnnnnnnnnnnnnnnnnnnnnnnnnnnnnnnnnnnnnnnnnnnnnnnnnnnnnnnnnnnnnnnnnnnnnnnnnnnnnnnnnnnnnnnnnnnnnnnnnnnnnnnnnnnnnnnnnnnnnnnnnnnnnnnnnnnnnnnnnnnnnnnnnnnnnnnnnnnnnnnnnnnnnnnnnnnnnnnnnnnnnnnnnnnnnnnnnnnnnnnnnnnnnnnnnnnnnnnnnnnnnnnnnnnnnnnnnnnnnnnnnnnnnnnnnnnnnnnnnnnnnnnnnnnnnnnnnnnnnnnnnnnnnnnnnnnnnnnnnnnnnnnnnnnnnnnnnnnnnnnnnnnnnnnnnnnnnnnnnnnnnnnnnnnnnnnnnnnnnnnnnnnnnnnnnnnnnnnnnnnnnnnnnnnnnnnnnnnnnnnnnnnnnnnnnnnnnnnnnnnnnnnnnnnnnnnnnnnnnnnnnnnnnnnnnnnnnnnnnnnnnnnnnnnnnnnnnnnnnnnnnnnnnnnnnnnnnnnnnnnnnnnnnnnnnnnnnnnnnnnnnnnnnnnnnnnnnnnnnnnnnnnnnnnnnnnnnnnnnnnnnnnnnnnnnnnnnnnnnnnnnnnnnnnnnnnnnnnnnnnnnnnnnnnnnnnnnnnnnnnnnnnnnnnnnnnnnnnnnnnnnnnnnnnnnnnnnnnnnnnnnnnnnnnnnnnnnnnnnnnnnnnnnnnnnnnnnnnnnnnnnnnnnnnnnnnnnnnnnnnnnnnnnnnnnnnnnnnnnnnnnnnnnnnnnnnnnnnnnnnnnnnnnnnnnnnnnnnnnnnnnnnnnnnnnnnnnnnnnnnnnnnnnnnnnnnnnnnnnnnnnnnnnnnnnnnnnnnnnnnnnnnnnnnnnnnnnnnnnnnnnnnnnnnnnnnnnnnnnnnnnnnnnnnnnnnnnnnnnnnnnnnnnnnnnnnnnnnnnnnnnnnnnnnnnnnnnnnnnnnnnnnnnnnnnnnnnnnnnnnnnnnnnnnnnnnnnnnnnnnnnnnnnnnnnnnnnnnnnnnnnnnnnnnnnnnnnnnnnnnnnnnnnnnnnnnnnnnnnnnnnnnnnnnnnnnnnnnnnnnnnnnnnnnnnnnnnnnnnnnnnnnnnnnnnnnnnnnnnnnnnnnnnnnnnnnnnnnnnnnnnnnnnnnnnnnnnnnnnnnnnnnnnnnnnnnnnnnnnnnnnnnnnnnnnnnnnnnnnnnnnnnnnnnnnnnnnnnnnnnnnnnnnnnnnnnnnnnnnnnnnnnnnnnnnnnnnnnnnnnnnnnnnnnnnnnnnnnnnnnnnnnnnnnnnnnnnnnnnnnnnnnnnnnnnnnnnnnnnnnnnnnnnnnnnnnnnnnnnnnnnnnnnnnnnnnnnnnnnnnnnnnnnnnnnnnnnnnnnnnnnnnnnnnnnnnnnnnnnnnnnnnnnnnnnnnnnnnnnnnnnnnnnnnnnnnnnnnnnnnnnnnnnnnnnnnnnnnnnnnnnnnnnnnnnnnnnnnnnnnnnnnnnnnnnnnnnnnnnnnnnnnnnnnnnnnnnnnnnnnnnnnnnnnnnnnnnnnnnnnnnnnnnnnnnnnnnnnnnnnnnnnnnnnnnnnnnnnnnnnnnnnnnnnnnnnnnnnnnnnnnnnnnnnnnnnnnnnnnnnnnnnnnnnnnnnnnnnnnnnnnnnnnnnnnnnnnnnnnnnnnnnnnnnnnnnnnnnnnnnnnnnnnnnnnnnnnnnnnnnnnnnnnnnnnnnnnnnnnnnnnnnnnnnnnnnnnnnnnnnnnnnnnnnnnnnnnnnnnnnnnnnnnnnnnnnnnnnnnnnnnnnnnnnnnnnnnnnnnnnnnnnnnnnnnnnnnnnnnnnnnnnnnnnnnnnnnnnnnnnnnnnnnnnnnnnnnnnnnnnnnnnnnnnnnnnnnnnnnnnnnnnnnnnnnnnnnnnnnnnnnnnnnnnnnnnnnnnnnnnnnnnnnnnnnnnnnnnnnnnnnnnnnnnnnnnnnnnnnnnnnnnnnnnnnnnnnnnnnnnnnnnnnnnnnnnnnnnnnnnnnnnnnnnnnnnnnnnnnnnnnnnnnnnnnnnnnnnnnnnnnnnnnnnnnnnnnnnnnnnnnnnnnnnnnnnnnnnnnnnnnnnnnnnnnnnnnnnnnnnnnnnnnnnnnnnnnnnnnnnnnnnnnnnnnnnnnnnnnnnnnnnnnnnnnnnnnnnnnnnnnnnnnnnnnnnnnnnnnnnnnnnnnnnnnnnnnnnnnnnnnnnnnnnnnnnnnnnnnnnnnnnnnnnnnnnnnnnnnnnnnnnnnnnnnnnnnnnnnnnnnnnnnnnnnnnnnnnnnnnnnnnnnnnnnnnnnnnnnnnnnnnnnnnnnnnnnnnnnnnnnnnnnnnnnnnnnnnnnnnnnnnnnnnnnnnnnnnnnnnnnnnnnnnnnnnnnnnnnnnnnnnnnnnnnnnnnnnnnnnnnnnnnnnnnnnnnnnnnnnnnnnnnnnnnnnnnnnnnnnnnnnnnnnnnnnnnnnnnnnnnnnnnnnnnnnnnnnnnnnnnnnnnnnnnnnnnnnnnnnnnnnnnnnnnnnnnnnnnnnnnnnnnnnnnnnnnnnnnnnnnnnnnnnnnnnnnnnnnnnnnnnnnnnnnnnnnnnnnnnnnnnnnnnnnnnnnnnnnnnnnnnnnnnnnnnnnnnnnnnnnnnnnnnnnnnnnnnnnnnnnnnnnnnnnnnnnnnnnnnnnnnnnnnnnnnnnnnnnnnnnnnnnnnnnnnnnnnnnnnnnnnnnnnnnnnnnnnnnnnnnnnnnnnnnnnnnnnnnnnnnnnnnnnnnnnnnnnnnnnnnnnnnnnnnnnnnnnnnnnnnnnnnnnnnnnnnnnnnnnnnnnnnnnnnnnnnnnnnnnnnnnnnnnnnnnnnnnnnnnnnnnnnnnnnnnnnnnnnnnnnnnnnnnnnnnnnnnnnnnnnnnnnnnnnnnnnnnnnnnnnnnnnnnnnnnnnnnnnnnnnnnnnnnnnnnnnnnnnnnnnnnnnnnnnnnnnnnnnnnnnnnnnnnnnnnnnnnnnnnnnnnnnnnnnnnnnnnnnnnnnnnnnnnnnnnnnnnnnnnnnnnnnnnnnnnnnnnnnnnnnnnnnnnnnnnnnnnnnnnnnnnnnnnnnnnnnnnnnnnnnnnnnnnnnnnnnnnnnnnnnnnnnnnnnnnnnnnnnnnnnnnnnnnnnnnnnnnnnnnnnnnnnnnnnnnnnnnnnnnnnnnnnnnnnnnnnnnnnnnnnnnnnnnnnnnnnnnnnnnnnnnnnnnnnnnnnnnnnnnnnnnnnnnnnnnnnnnnnnnnnnnnnnnnnnnnnnnnnnnnnnnnnnnnnnnnnnnnnnnnnnnnnnnnnnnnnnnnnnnnnnnnnnnnnnnnnnnnnnnnnnnnnnnnnnnnnnnnnnnnnnnnnnnnnnnnnnnnnnnnnnnnnnnnnnnnnnnnnnnnnnnnnnnnnnnnnnnnnnnnnnnnnnnnnnnnnnnnnnnnnnnnnnnnnnnnnnnnnnnnnnnnnnnnnnnnnnnnnnnnnnnnnnnnnnnnnnnnnnnnnnnnnnnnnnnnnnnnnnnnnnnnnnnnnnnnnnnnnnnnnnnnnnnnnnnnnnnnnnnnnnnnnnnnnnnnnnnnnnnnnnnnnnnnnnnnnnnnnnnnnnnnnnnnnnnnnnnnnnnnnnnnnnnnnnnnnnnnnnnnnnnnnnnnnnnnnnnnnnnnnnnnnnnnnnnnnnnnnnnnnnnnnnnnnnnnnnnnnnnnnnnnnnnnnnnnnnnnnnnnnnnnnnnnnnnnnnnnnnnnnnnnnnnnnnnnnnnnnnnnnnnnnnnnnnnnnnnnnnnnnnnnnnnnnnnnnnnnnnnnnnnnnnnnnnnnnnnnnnnnnnnnnnnnnnnnnnnnnnnnnnnnnnnnnnnnnnnnnnnnnnnnnnnnnnnnnnnnnnnnnnnnnnnnnnnnnnnnnnnnnnnnnnnnnnnnnnnnnnnnnnnnnnnnnnnnnnnnnnnnnnnnnnnnnnnnnnnnnnnnnnnnnnnnnnnnnnnnnnnnnnnnnnnnnnnnnnnnnnnnnnnnnnnnnnnnnnnnnnnnnnnnnnnnnnnnnnnnnnnnnnnnnnnnnnnnnnnnnnnnnnnnnnnnnnnnnnnnnnnnnnnnnnnnnnnnnnnnnnnnnnnnnnnnnnnnnnnnnnnnnnnnnnnnnnnnnnnnnnnnnnnnnnnnnnnnnnnnnnnnnnnnnnnnnnnnnnnnnnnnnnnnnnnnnnnnnnnnnnnnnnnnnnnnnnnnnnnnnnnnnnnnnnnnnnnnnnnnnnnnnnnnnnnnnnnnnnnnnnnnnnnnnnnnnnnnnnnnnnnnnnnnnnnnnnnnnnnnnnnnnnnnnnnnnnnnnnnnnnnnnnnnnnnnnnnnnnnnnnnnnnnnnnnnnnnnnnnnnnnnnnnnnnnnnnnnnnnnnnnnnnnnnnnnnnnnnnnnnnnnnnnnnnnnnnnnnnnnnnnnnnnnnnnnnnnnnnnnnnnnnnnnnnnnnnnnnnnnnnnnnnnnnnnnnnnnnnnnnnnnnnnnnnnnnnnnnnnnnnnnnnnnnnnnnnnnnnnnnnnnnnnnnnnnnnnnnnnnnnnnnnnnnnnnnnnnnnnnnnnnnnnnnnnnnnnnnnnnnnnnnnnnnnnnnnnnnnnnnnnnnnnnnnnnnnnnnnnnnnnnnnnnnnnnnnnnnnnnnnnnnnnnnnnnnnnnnnnnnnnnnnnnnnnnnnnnnnnnnnnnnnnnnnnnnnnnnnnnnnnnnnnnnnnnnnnnnnnnnnnnnnnnnnnnnnnnnnnnnnnnnnnnnnnnnnnnnnnnnnnnnnnnnnnnnnnnnnnnnnnnnnnnnnnnnnnnnnnnnnnnnnnnnnnnnnnnnnnnnnnnnnnnnnnnnnnnnnnnnnnnnnnnnnnnnnnnnnnnnnnnnnnnnnnnnnnnnnnnnnnnnnnnnnnnnnnnnnnnnnnnnnnnnnnnnnnnnnnnnnnnnnnnnnnnnnnnnnnnnnnnnnnnnnnnnnnnnnnnnnnnnnnnnnnnnnnnnnnnnnnnnnnnnnnnnnnnnnnnnnnnnnnnnnnnnnnnnnnnnnnnnnnnnnnnnnnnnnnnnnnnnnnnnnnnnnnnnnnnnnnnnnnnnnnnnnnnnnnnnnnnnnnnnnnnnnnnnnnnnnnnnnnnnnnnnnnnnnnnnnnnnnnnnnnnnnnnnnnnnnnnnnnnnnnnnnnnnnnnnnnnnnnnnnnnnnnnnnnnnnnnnnnnnnnnnnnnnnnnnnnnnnnnnnnnnnnnnnnnnnnnnnnnnnnnnnnnnnnnnnnnnnnnnnnnnnnnnnnnnnnnnnnnnnnnnnnnnnnnnnnnnnnnnnnnnnnnnnnnnnnnnnnnnnnnnnnnnnnnnnnnnnnnnnnnnnnnnnnnnnnnnnnnnnnnnnnnnnnnnnnnnnnnnnnnnnnnnnnnnnnnnnnnnnnnnnnnnnnnnnnnnnnnnnnnnnnnnnnnnnnnnnnnnnnnnnnnnnnnnnnnnnnnnnnnnnnnnnnnnnnnnnnnnnnnnnnnnnnnnnnnnnnnnnnnnnnnnnnnnnnnnnnnnnnnnnnnnnnnnnnnnnnnnnnnnnnnnnnnnnnnnnnnnnnnnnnnnnnnnnnnnnnnnnnnnnnnnnnnnnnnnnnnnnnnnnnnnnnnnnnnnnnnnnnnnnnnnnnnnnnnnnnnnnnnnnnnnnnnnnnnnnnnnnnnnnnnnnnnnnnnnnnnnnnnnnnnnnnnnnnnnnnnnnnnnnnnnnnnnnnnnnnnnnnnnnnnnnnnnnnnnnnnnnnnnnnnnnnnnnnnnnnnnnnnnnnnnnnnnnnnnnnnnnnnnnnnnnnnnnnnnnnnnnnnnnnnnnnnnnnnnnnnnnnnnnnnnnnnnnnnnnnnnnnnnnnnnnnnnnnnnnnnnnnnnnnnnnnnnnnnnnnnnnnnnnnnnnnnnnnnnnnnnnnnnnnnnnnnnnnnnnnnnnnnnnnnnnnnnnnnnnnnnnnnnnnnnnnnnnnnnnnnnnnnnnnnnnnnnnnnnnnnnnnnnnnnnnnnnnnnnnnnnnnnnnnnnnnnnnnnnnnnnnnnnnnnnnnnnnnnnnnnnnnnnnnnnnnnnnnnnnnnnnnnnnnnnnnnnnnnnnnnnnnnnnnnnnnnnnnnnnnnnnnnnnnnnnnnnnnnnnnnnnnnnnnnnnnnnnnnnnnnnnnnnnnnnnnnnnnnnnnnnnnnnnnnnnnnnnnnnnnnnnnnnnnnnnnnnnnnnnnnnnnnnnnnnnnnnnnnnnnnnnnnnnnnnnnnnnnnnnnnnnnnnnnnnnnnnnnnnnnnnnnnnnnnnnnnnnnnnnnnnnnnnnnnnnnnnnnnnnnnnnnnnnnnnnnnnnnnnnnnnnnnnnnnnnnnnnnnnnnnnnnnnnnnnnnnnnnnnnnnnnnnnnnnnnnnnnnnnnnnnnnnnnnnnnnnnnnnnnnnnnnnnnnnnnnnnnnnnnnnnnnnnnnnnnnnnnnnnnnnnnnnnnnnnnnnnnnnnnnnnnnnnnnnnnnnnnnnnnnnnnnnnnnnnnnnnnnnnnnnnnnnnnnnnnnnnnnnnnnnnnnnnnnnnnnnnnnnnnnnnnnnnnnnnnnnnnnnnnnnnnnnnnnnnnnnnnnnnnnnnnnnnnnnnnnnnnnnnnnnnnnnnnnnnnnnnnnnnnnnnnnnnnnnnnnnnnnnnnnnnnnnnnnnnnnnnnnnnnnnnnnnnnnnnnnnnnnnnnnnnnnnnnnnnnnnnnnnnnnnnnnnnnnnnnnnnnnnnnnnnnnnnnnnnnnnnnnnnnnnnnnnnnnnnnnnnnnnnnnnnnnnnnnnnnnnnnnnnnnnnnnnnnnnnnnnnnnnnnnnnnnnnnnnnnnnnnnnnnnnnnnnnnnnnnnnnnnnnnnnnnnnnnnnnnnnnnnnnnnnnnnnnnnnnnnnnnnnnnnnnnnnnnnnnnnnnnnnnnnnnnnnnnnnnnnnnnnnnnnnnnnnnnnnnnnnnnnnnnnnnnnnnnnnnnnnnnnnnnnnnnnnnnnnnnnnnnnnnnnnnnnnnnnnnnnnnnnnnnnnnnnnnnnnnnnnnnnnnnnnnnnnnnnnnnnnnnnnnnnnnnnnnnnnnnnnnnnnnnnnnnnnnnnnnnnnnnnnnnnnnnnnnnnnnnnnnnnnnnnnnnnnnnnnnnnnnnnnnnnnnnnnnnnnnnnnnnnnnnnnnnnnnnnnnnnnnnnnnnnnnnnnnnnnnnnnnnnnnnnnnnnnnnnnnnnnnnnnnnnnnnnnnnnnnnnnnnnnnnnnnnnnnnnnnnnnnnnnnnnnnnnnnnnnnnnnnnnnnnnnnnnnnnnnnnnnnnnnnnnnnnnnnnnnnnnnnnnnnnnnnnnnnnnnnnnnnnnnnnnnnnnnnnnnnnnnnnnnnnnnnnnnnnnnnnnnnnnnnnnnnnnnnnnnnnnnnnnnnnnnnnnnnnnnnnnnnnnnnnnnnnnnnnnnnnnnnnnnnnnnnnnnnnnnnnnnnnnnnnnnnnnnnnnnnnnnnnnnnnnnnnnnnnnnnnnnnnnnnnnnnnnnnnnnnnnnnnnnnnnnnnnnnnnnnnnnnnnnnnnnnnnnnnnnnnnnnnnnnnnnnnnnnnnnnnnnnnnnnnnnnnnnnnnnnnnnnnnnnnnnnnnnnnnnnnnnnnnnnnnnnnnnnnnnnnnnnnnnnnnnnnnnnnnnnnnnnnnnnnnnnnnnnnnnnnnnnnnnnnnnnnnnnnnnnnnnnnnnnnnnnnnnnnnnnnnnnnnnnnnnnnnnnnnnnnnnnnnnnnnnnnnnnnnnnnnnnnnnnnnnnnnnnnnnnnnnnnnnnnnnnnnnnnnnnnnnnnnnnnnnnnnnnnnnnnnnnnnnnnnnnnnnnnnnnnnnnnnnnnnnnnnnnnnnnnnnnnnnnnnnnnnnnnnnnnnnnnnnnnnnnnnnnnnnnnnnnnnnnnnnnnnnnnnnnnnnnnnnnnnnnnnnnnnnnnnnnnnnnnnnnnnnnnnnnnnnnnnnnnnnnnnnnnnnnnnnnnnnnnnnnnnnnnnnnnnnnnnnnnnnnnnnnnnnnnnnnnnnnnnnnnnnnnnnnnnnnnnnnnnnnnnnnnnnnnnnnnnnnnnnnnnnnnnnnnnnnnnnnnnnnnnnnnnnnnnnnnnnnnnnnnnnnnnnnnnnnnnnnnnnnnnnnnnnnnnnnnnnnnnnnnnnnnnnnnnnnnnnnnnnnnnnnnnnnnnnnnnnnnnnnnnnnnnnnnnnnnnnnnnnnnnnnnnnnnnnnnnnnnnnnnnnnnnnnnnnnnnnnnnnnnnnnnnnnnnnnnnnnnnnnnnnnnnnnnnnnnnnnnnnnnnnnnnnnnnnnnnnnnnnnnnnnnnnnnnnnnnnnnnnnnnnnnnnnnnnnnnnnnnnnnnnnnnnnnnnnnnnnnnnnnnnnnnnnnnnnnnnnnnnnnnnnnnnnnnnnnnnnnnnnnnnnnnnnnnnnnnnnnnnnnnnnnnnnnnnnnnnnnnnnnnnnnnnnnnnnnnnnnnnnnnnnnnnnnnnnnnnnnnnnnnnnnnnnnnnnnnnnnnnnnnnnnnnnnnnnnnnnnnnnnnnnnnnnnnnnnnnnnnnnnnnnnnnnnnnnnnnnnnnnnnnnnnnnnnnnnnnnnnnnnnnnnnnnnnnnnnnnnnnnnnnnnnnnnnnnnnnnnnnnnnnnnnnnnnnnnnnnnnnnnnnnnnnnnnnnnnnnnnnnnnnnnnnnnnnnnnnnnnnnnnnnnnnnnnnnnnnnnnnnnnnnnnnnnnnnnnnnnnnnnnnnnnnnnnnnnnnnnnnnnnnnnnnnnnnnnnnnnnnnnnnnnnnnnnnnnnnnnnnnnnnnnnnnnnnnnnnnnnnnnnnnnnnnnnnnnnnnnnnnnnnnnnnnnnnnnnnnnnnnnnnnnnnnnnnnnnnnnnnnnnnnnnnnnnnnnnnnnnnnnnnnnnnnnnnnnnnnnnnnnnnnnnnnnnnnnnnnnnnnnnnnnnnnnnnnnnnnnnnnnnnnnnnnnnnnnnnnnnnnnnnnnnnnnnnnnnnnnnnnnnnnnnnnnnnnnnnnnnnnnnnnnnnnnnnnnnnnnnnnnnnnnnnnnnnnnnnnnnnnnnnnnnnnnnnnnnnnnnnnnnnnnnnnnnnnnnnnnnnnnnnnnnnnnnnnnnnnnnnnnnnnnnnnnnnnnnnnnnnnnnnnnnnnnnnnnnnnnnnnnnnnnnnnnnnnnnnnnnnnnnnnnnnnnnnnnnnnnnnnnnnnnnnnnnnnnnnnnnnnnnnnnnnnnnnnnnnnnnnnnnnnnnnnnnnnnnnnnnnnnnnnnnnnnnnnnnnnnnnnnnnnnnnnnnnnnnnnnnnnnnnnnnnnnnnnnnnnnnnnnnnnnnnnnnnnnnnnnnnnnnnnnnnnnnnnnnnnnnnnnnnnnnnnnnnnnnnnnnnnnnnnnnnnnnnnnnnnnnnnnnnnnnnnnnnnnnnnnnnnnnnnnnnnnnnnnnnnnnnnnnnnnnnnnnnnnnnnnnnnnnnnnnnnnnnnnnnnnnnnnnnnnnnnnnnnnnnnnnnnnnnnnnnnnnnnnnnnnnnnnnnnnnnnnnnnnnnnnnnnnnnnnnnnnnnnnnnnnnnnnnnnnnnnnnnnnnnnnnnnnnnnnnnnnnnnnnnnnnnnnnnnnnnnnnnnnnnnnnnnnnnnnnnnnnnnnnnnnnnnnnnnnnnnnnnnnnnnnnnnnnnnnnnnnnnnnnnnnnnnnnnnnnnnnnnnnnnnnnnnnnnnnnnnnnnnnnnnnnnnnnnnnnnnnnnnnnnnnnnnnnnnnnnnnnnnnnnnnnnnnnnnnnnnnnnnnnnnnnnnnnnnnnnnnnnnnnnnnnnnnnnnnnnnnnnnnnnnnnnnnnnnnnnnnnnnnnnnnnnnnnnnnnnnnnnnnnnnnnnnnnnnnnnnnnnnnnnnnnnnnnnnnnnnnnnnnnnnnnnnnnnnnnnnnnnnnnnnnnnnnnnnnnnnnnnnnnnnnnnnnnnnnnnnnnnnnnnnnnnnnnnnnnnnnnnnnnnnnnnnnnnnnnnnnnnnnnnnnnnnnnnnnnnnnnnnnnnnnnnnnnnnnnnnnnnnnnnnnnnnnnnnnnnnnnnnnnnnnnnnnnnnnnnnnnnnnnnnnnnnnnnnnnnnnnnnnnnnnnnnnnnnnnnnnnnnnnnnnnnnnnnnnnnnnnnnnnnnnnnnnnnnnnnnnnnnnnnnnnnnnnnnnnnnnnnnnnnnnnnnnnnnnnnnnnnnnnnnnnnnnnnnnnnnnnnnnnnnnnnnnnnnnnnnnnnnnnnnnnnnnnnnnnnnnnnnnnnnnnnnnnnnnnnnnnnnnnnnnnnnnnnnnnnnnnnnnnnnnnnnnnnnnnnnnnnnnnnnnnnnnnnnnnnnnnnnnnnnnnnnnnnnnnnnnnnnnnnnnnnnnnnnnnnnnnnnnnnnnnnnnnnnnnnnnnnnnnnnnnnnnnnnnnnnnnnnnnnnnnnnnnnnnnnnnnnnnnnnnnnnnnnnnnnnnnnnnnnnnnnnnnnnnnnnnnnnnnnnnnnnnnnnnnnnnnnnnnnnnnnnnnnnnnnnnnnnnnnnnnnnnnnnnnnnnnnnnnnnnnnnnnnnnnnnnnnnnnnnnnnnnnnnnnnnnnnnnnnnnnnnnnnnnnnnnnnnnnnnnnnnnnnnnnnnnnnnnnnnnnnnnnnnnnnnnnnnnnnnnnnnnnnnnnnnnnnnnnnnnnnnnnnnnnnnnnnnnnnnnnnnnnnnnnnnnnnnnnnnnnnnnnnnnnnnnnnnnnnnnnnnnnnnnnnnnnnnnnnnnnnnnnnnnnnnnnnnnnnnnnnnnnnnnnnnnnnnnnnnnnnnnnnnnnnnnnnnnnnnnnnnnnnnnnnnnnnnnnnnnnnnnnnnnnnnnnnnnnnnnnnnnnnnnnnnnnnnnnnnnnnnnnnnnnnnnnnnnnnnnnnnnnnnnnnnnnnnnnnnnnnnnnnnnnnnnnnnnnnnnnnnnnnnnnnnnnnnnnnnnnnnnnnnnnnnnnnnnnnnnnnnnnnnnnnnnnnnnnnnnnnnnnnnnnnnnnnnnnnnnnnnnnnnnnnnnnnnnnnnnnnnnnnnnnnnnnnnnnnnnnnnnnnnnnnnnnnnnnnnnnnnnnnnnnnnnnnnnnnnnnnnnnnnnnnnnnnnnnnnnnnnnnnnnnnnnnnnnnnnnnnnnnnnnnnnnnnnnnnnnnnnnnnnnnnnnnnnnnnnnnnnnnnnnnnnnnnnnnnnnnnnnnnnnnnnnnnnnnnnnnnnnnnnnnnnnnnnnnnnnnnnnnnnnnnnnnnnnnnnnnnnnnnnnnnnnnnnnnnnnnnnnnnnnnnnnnnnnnnnnnnnnnnnnnnnnnnnnnnnnnnnnnnnnnnnnnnnnnnnnnnnnnnnnnnnnnnnnnnnnnnnnnnnnnnnnnnnnnnnnnnnnnnnnnnnnnnnnnnnnnnnnnnnnnnnnnnnnnnnnnnnnnnnnnnnnnnnnnnnnnnnnnnnnnnnnnnnnnnnnnnnnnnnnnnnnnnnnnnnnnnnnnnnnnnnnnnnnnnnnnnnnnnnnnnnnnnnnnnnnnnnnnnnnnnnnnnnnnnnnnnnnnnnnnnnnnnnnnnnnnnnnnnnnnnnnnnnnnnnnnnnnnnnnnnnnnnnnnnnnnnnnnnnnnnnnnnnnnnnnnnnnnnnnnnnnnnnnnnnnnnnnnnnnnnnnnnnnnnnnnnnnnnnnnnnnnnnnnnnnnnnnnnnnnnnnnnnnnnnnnnnnnnnnnnnnnnnnnnnnnnnnnnnnnnnnnnnnnnnnnnnnnnnnnnnnnnnnnnnnnnnnnnnnnnnnnnnnnnnnnnnnnnnnnnnnnnnnnnnnnnnnnnnnnnnnnnnnnnnnnnnnnnnnnnnnnnnnnnnnnnnnnnnnnnnnnnnnnnnnnnnnnnnnnnnnnnnnnnnnnnnnnnnnnnnnnnnnnnnnnnnnnnnnnnnnnnnnnnnnnnnnnnnnnnnnnnnnnnnnnnnnnnnnnnnnnnnnnnnnnnnnnnnnnnnnnnnnnnnnnnnnnnnnnnnnnnnnnnnnnnnnnnnnnnnnnnnnnnnnnnnnnnnnnnnnnnnnnnnnnnnnnnnnnnnnnnnnnnnnnnnnnnnnnnnnnnnnnnnnnnnnnnnnnnnnnnnnnnnnnnnnnnnnnnnnnnnnnnnnnnnnnnnnnnnnnnnnnnnnnnnnnnnnnnnnnnnnnnnnnnnnnnnnnnnnnnnnnnnnnnnnnnnnnnnnnnnnnnnnnnnnnnnnnnnnnnnnnnnnnnnnnnnnnnnnnnnnnnnnnnnnnnnnnnnnnnnnnnnnnnnnnnnnnnnnnnnnnnnnnnnnnnnnnnnnnnnnnnnnnnnnnnnnnnnnnnnnnnnnnnnnnnnnnnnnnnnnnnnnnnnnnnnnnnnnnnnnnnnnnnnnnnnnnnnnnnnnnnnnnnnnnnnnnnnnnnnnnnnnnnnnnnnnnnnnnnnnnnnnnnnnnnnnnnnnnnnnnnnnnnnnnnnnnnnnnnnnnnnnnnnnnnnnnnnnnnnnnnnnnnnnnnnnnnnnnnnnnnnnnnnnnnnnnnnnnnnnnnnnnnnnnnnnnnnnnnnnnnnnnnnnnnnnnnnnnnnnnnnnnnnnnnnnnnnnnnnnnnnnnnnnnnnnnnnnnnnnnnnnnnnnnnnnnnnnnnnnnnnnnnnnnnnnnnnnnnnnnnnnnnnnnnnnnnnnnnnnnnnnnnnnnnnnnnnnnnnnnnnnnnnnnnnnnnnnnnnnnnnnnnnnnnnnnnnnnnnnnnnnnnnnnnnnnnnnnnnnnnnnnnnnnnnnnnnnnnnnnnnnnnnnnnnnnnnnnnnnnnnnnnnnnnnnnnnnnnnnnnnnnnnnnnnnnnnnnnnnnnnnnnnnnnnnnnnnnnnnnnnnnnnnnnnnnnnnnnnnnnnnnnnnnnnnnnnnnnnnnnnnnnnnnnnnnnnnnnnnnnnnnnnnnnnnnnnnnnnnnnnnnnnnnnnnnnnnnnnnnnnnnnnnnnnnnnnnnnnnnnnnnnnnnnnnnnnnnnnnnnnnnnnnnnnnnnnnnnnnnnnnnnnnnnnnnnnnnnnnnnnnnnnnnnnnnnnnnnnnnnnnnnnnnnnnnnnnnnnnnnnnnnnnnnnnnnnnnnnnnnnnnnnnnnnnnnnnnnnnnnnnnnnnnnnnnnnnnnnnnnnnnnnnnnnnnnnnnnnnnnnnnnnnnnnnnnnnnnnnnnnnnnnnnnnnnnnnnnnnnnnnnnnnnnnnnnnnnnnnnnnnnnnnnnnnnnnnnnnnnnnnnnnnnnnnnnnnnnnnnnnnnnnnnnnnnnnnnnnnnnnnnnnnnnnnnnnnnnnnnnnnnnnnnnnnnnnnnnnnnnnnnnnnnnnnnnnnnnnnnnnnnnnnnnnnnnnnnnnnnnnnnnnnnnnnnnnnnnnnnnnnnnnnnnnnnnnnnnnnnnnnnnnnnnnnnnnnnnnnnnnnnnnnnnnnnnnnnnnnnnnnnnnnnnnnnnnnnnnnnnnnnnnnnnnnnnnnnnnnnnnnnnnnnnnnnnnnnnnnnnnnnnnnnnnnnnnnnnnnnnnnnnnnnnnnnnnnnnnnnnnnnnnnnnnnnnnnnnnnnnnnnnnnnnnnnnnnnnnnnnnnnnnnnnnnnnnnnnnnnnnnnnnnnnnnnnnnnnnnnnnnnnnnnnnnnnnnnnnnnnnnnnnnnnnnnnnnnnnnnnnnnnnnnnnnnnnnnnnnnnnnnnnnnnnnnnnnnnnnnnnnnnnnnnnnnnnnnnnnnnnnnnnnnnnnnnnnnnnnnnnnnnnnnnnnnnnnnnnnnnnnnnnnnnnnnnnnnnnnnnnnnnnnnnnnnnnnnnnnnnnnnnnnnnnnnnnnnnnnnnnnnnnnnnnnnnnnnnnnnnnnnnnnnnnnnnnnnnnnnnnnnnnnnnnnnnnnnnnnnnnnnnnnnnnnnnnnnnnnnnnnnnnnnnnnnnnnnnnnnnnnnnnnnnnnnnnnnnnnnnnnnnnnnnnnnnnnnnnnnnnnnnnnnnnnnnnnnnnnnnnnnnnnnnnnnnnnnnnnnnnnnnnnnnnnnnnnnnnnnnnnnnnnnnnnnnnnnnnnnnnnnnnnnnnnnnnnnnnnnnnnnnnnnnnnnnnnnnnnnnnnnnnnnnnnnnnnnnnnnnnnnnnnnnnnnnnnnnnnnnnnnnnnnnnnnnnnnnnnnnnnnnnnnnnnnnnnnnnnnnnnnnnnnnnnnnnnnnnnnnnnnnnnnnnnnnnnnnnnnnnnnnnnnnnnnnnnnnnnnnnnnnnnnnnnnnnnnnnnnnnnnnnnnnnnnnnnnnnnnnnnnnnnnnnnnnnnnnnnnnnnnnnnnnnnnnnnnnnnnnnnnnnnnnnnnnnnnnnnnnnnnnnnnnnnnnnnnnnnnnnnnnnnnnnnnnnnnnnnnnnnnnnnnnnnnnnnnnnnnnnnnnnnnnnnnnnnnnnnnnnnnnnnnnnnnnnnnnnnnnnnnnnnnnnnnnnnnnnnnnnnnnnnnnnnnnnnnnnnnnnnnnnnnnnnnnnnnnnnnnnnnnnnnnnnnnnnnnnnnnnnnnnnnnnnnnnnnnnnnnnnnnnnnnnnnnnnnnnnnnnnnnnnnnnnnnnnnnnnnnnnnnnnnnnnnnnnnnnnnnnnnnnnnnnnnnnnnnnnnnnnnnnnnnnnnnnnnnnnnnnnnnnnnnnnnnnnnnnnnnnnnnnnnnnnnnnnnnnnnnnnnnnnnnnnnnnnnnnnnnnnnnnnnnnnnnnnnnnnnnnnnnnnnnnnnnnnnnnnnnnnnnnnnnnnnnnnnnnnnnnnnnnnnnnnnnnnnnnnnnnnnnnnnnnnnnnnnnnnnnnnnnnnnnnnnnnnnnnnnnnnnnnnnnnnnnnnnnnnnnnnnnnnnnnnnnnnnnnnnnnnnnnnnnnnnnnnnnnnnnnnnnnnnnnnnnnnnnnnnnnnnnnnnnnnnnnnnnnnnnnnnnnnnnnnnnnnnnnnnnnnnnnnnnnnnnnnnnnnnnnnnnnnnnnnnnnnnnnnnnnnnnnnnnnnnnnnnnnnnnnnnnnnnnnnnnnnnnnnnnnnnnnnnnnnnnnnnnnnnnnnnnnnnnnnnnnnnnnnnnnnnnnnnnnnnnnnnnnnnnnnnnnnnnnnnnnnnnnnnnnnnnnnnnnnnnnnnnnnnnnnnnnnnnnnnnnnnnnnnnnnnnnnnnnnnnnnnnnnnnnnnnnnnnnnnnnnnnnnnnnnnnnnnnnnnnnnnnnnnnnnnnnnnnnnnnnnnnnnnnnnnnnnnnnnnnnnnnnnnnnnnnnnnnnnnnnnnnnnnnnnnnnnnnnnnnnnnnnnnnnnnnnnnnnnnnnnnnnnnnnnnnnnnnnnnnnnnnnnnnnnnnnnnnnnnnnnnnnnnnnnnnnnnnnnnnnnnnnnnnnnnnnnnnnnnnnnnnnnnnnnnnnnnnnnnnnnnnnnnnnnnnnnnnnnnnnnnnnnnnnnnnnnnnnnnnnnnnnnnnnnnnnnnnnnnnnnnnnnnnnnnnnnnnnnnnnnnnnnnnnnnnnnnnnnnnnnnnnnnnnnnnnnnnnnnnnnnnnnnnnnnnnnnnnnnnnnnnnnnnnnnnnnnnnnnnnnnnnnnnnnnnnnnnnnnnnnnnnnnnnnnnnnnnnnnnnnnnnnnnnnnnnnnnnnnnnnnnnnnnnnnnnnnnnnnnnnnnnnnnnnnnnnnnnnnnnnnnnnnnnnnnnnnnnnnnnnnnnnnnnnnnnnnnnnnnnnnnnnnnnnnnnnnnnnnnnnnnnnnnnnnnnnnnnnnnnnnnnnnnnnnnnnnnnnnnnnnnnnnnnnnnnnnnnnnnnnnnnnnnnnnnnnnnnnnnnnnnnnnnnnnnnnnnnnnnnnnnnnnnnnnnnnnnnnnnnnnnnnnnnnnnnnnnnnnnnnnnnnnnnnnnnnnnnnnnnnnnnnnnnnnnnnnnnnnnnnnnnnnnnnnnnnnnnnnnnnnnnnnnnnnnnnnnnnnnnnnnnnnnnnnnnnnnnnnnnnnnnnnnnnnnnnnnnnnnnnnnnnnnnnnnnnnnnnnnnnnnnnnnnnnnnnnnnnnnnnnnnnnnnnnnnnnnnnnnnnnnnnnnnnnnnnnnnnnnnnnnnnnnnnnnnnnnnnnnnnnnnnnnnnnnnnnnnnnnnnnnnnnnnnnnnnnnnnnnnnnnnnnnnnnnnnnnnnnnnnnnnnnnnnnnnnnnnnnnnnnnnnnnnnnnnnnnnnnnnnnnnnnnnnnnnnnnnnnnnnnnnnnnnnnnnnnnnnnnnnnnnnnnnnnnnnnnnnnnnnnnnnnnnnnnnnnnnnnnnnnnnnnnnnnnnnnnnnnnnnnnnnnnnnnnnnnnnnnnnnnnnnnnnnnnnnnnnnnnnnnnnnnnnnnnnnnnnnnnnnnnnnnnnnnnnnnnnnnnnnnnnnnnnnnnnnnnnnnnnnnnnnnnnnnnnnnnnnnnnnnnnnnnnnnnnnnnnnnnnnnnnnnnnnnnnnnnnnnnnnnnnnnnnnnnnnnnnnnnnnnnnnnnnnnnnnnnnnnnnnnnnnnnnnnnnnnnnnnnnnnnnnnnnnnnnnnnnnnnnnnnnnnnnnnnnnnnnnnnnnnnnnnnnnnnnnnnnnnnnnnnnnnnnnnnnnnnnnnnnnnnnnnnnnnnnnnnnnnnnnnnnnnnnnnnnnnnnnnnnnnnnnnnnnnnnnnnnnnnnnnnnnnnnnnnnnnnnnnnnnnnnnnnnnnnnnnnnnnnnnnnnnnnnnnnnnnnnnnnnnnnnnnnnnnnnnnnnnnnnnnnnnnnnnnnnnnnnnnnnnnnnnnnnnnnnnnnnnnnnnnnnnnnnnnnnnnnnnnnnnnnnnnnnnnnnnnnnnnnnnnnnnnnnnnnnnnnnnnnnnnnnnnnnnnnnnnnnnnnnnnnnnnnnnnnnnnnnnnnnnnnnnnnnnnnnnnnnnnnnnnnnnnnnnnnnnnnnnnnnnnnnnnnnnnnnnnnnnnnnnnnnnnnnnnnnnnnnnnnnnnnnnnnnnnnnnnnnnnnnnnnnnnnnnnnnnnnnnnnnnnnnnnnnnnnnnnnnnnnnnnnnnnnnnnnnnnnnnnnnnnnnnnnnnnnnnnnnnnnnnnnnnnnnnnnnnnnnnnnnnnnnnnnnnnnnnnnnnnnnnnnnnnnnnnnnnnnnnnnnnnnnnnnnnnnnnnnnnnnnnnnnnnnnnnnnnnnnnnnnnnnnnnnnnnnnnnnnnnnnnnnnnnnnnnnnnnnnnnnnnnnnnnnnnnnnnnnnnnnnnnnnnnnnnnnnnnnnnnnnnnnnnnnnnnnnnnnnnnnnnnnnnnnnnnnnnnnnnnnnnnnnnnnnnnnnnnnnnnnnnnnnnnnnnnnnnnnnnnnnnnnnnnnnnnnnnnnnnnnnnnnnnnnnnnnnnnnnnnnnnnnnnnnnnnnnnnnnnnnnnnnnnnnnnnnnnnnnnnnnnnnnnnnnnnnnnnnnnnnnnnnnnnnnnnnnnnnnnnnnnnnnnnnnnnnnnnnnnnnnnnnnnnnnnnnnnnnnnnnnnnnnnnnnnnnnnnnnnnnnnnnnnnnnnnnnnnnnnnnnnnnnnnnnnnnnnnnnnnnnnnnnnnnnnnnnnnnnnnnnnnnnnnnnnnnnnnnnnnnnnnnnnnnnnnnnnnnnnnnnnnnnnnnnnnnnnnnnnnnnnnnnnnnnnnnnnnnnnnnnnnnnnnnnnnnnnnnnnnnnnnnnnnnnnnnnnnnnnnnnnnnnnnnnnnnnnnnnnnnnnnnnnnnnnnnnnnnnnnnnnnnnnnnnnnnnnnnnnnnnnnnnnnnnnnnnnnnnnnnnnnnnnnnnnnnnnnnnnnnnnnnnnnnnnnnnnnnnnnnnnnnnnnnnnnnnnnnnnnnnnnnnnnnnnnnnnnnnnnnnnnnnnnnnnnnnnnnnnnnnnnnnnnnnnnnnnnnnnnnnnnnnnnnnnnnnnnnnnnnnnnnnnnnnnnnnnnnnnnnnnnnnnnnnnnnnnnnnnnnnnnnnnnnnnnnnnnnnnnnnnnnnnnnnnnnnnnnnnnnnnnnnnnnnnnnnnnnnnnnnnnnnnnnnnnnnnnnnnnnnnnnnnnnnnnnnnnnnnnnnnnnnnnnnnnnnnnnnnnnnnnnnnnnnnnnnnnnnnnnnnnnnnnnnnnnnnnnnnnnnnnnnnnnnnnnnnnnnnnnnnnnnnnnnnnnnnnnnnnnnnnnnnnnnnnnnnnnnnnnnnnnnnnnnnnnnnnnnnnnnnnnnnnnnnnnnnnnnnnnnnnnnnnnnnnnnnnnnnnnnnnnnnnnnnnnnnnnnnnnnnnnnnnnnnnnnnnnnnnnnnnnnnnnnnnnnnnnnnnnnnnnnnnnnnnnnnnnnnnnnnnnnnnnnnnnnnnnnnnnnnnnnnnnnnnnnnnnnnnnnnnnnnnnnnnnnnnnnnnnnnnnnnnnnnnnnnnnnnnnnnnnnnnnnnnnnnnnnnnnnnnnnnnnnnnnnnnnnnnnnnnnnnnnnnnnnnnnnnnnnnnnnnnnnnnnnnnnnnnnnnnnnnnnnnnnnnnnnnnnnnnnnnnnnnnnnnnnnnnnnnnnnnnnnnnnnnnnnnnnnnnnnnnnnnnnnnnnnnnnnnnnnnnnnnnnnnnnnnnnnnnnnnnnnnnnnnnnnnnnnnnnnnnnnnnnnnnnnnnnnnnnnnnnnnnnnnnnnnnnnnnnnnnnnnnnnnnnnnnnnnnnnnnnnnnnnnnnnnnnnnnnnnnnnnnnnnnnnnnnnnnnnnnnnnnnnnnnnnnnnnnnnnnnnnnnnnnnnnnnnnnnnnnnnnnnnnnnnnnnnnnnnnnnnnnnnnnnnnnnnnnnnnnnnnnnnnnnnnnnnnnnnnnnnnnnnnnnnnnnnnnnnnnnnnnnnnnnnnnnnnnnnnnnnnnnnnnnnnnnnnnnnnnnnnnnnnnnnnnnnnnnnnnnnnnnnnnnnnnnnnnnnnnnnnnnnnnnnnnnnnnnnnnnnnnnnnnnnnnnnnnnnnnnnnnnnnnnnnnnnnnnnnnnnnnnnnnnnnnnnnnnnnnnnnnnnnnnnnnnnnnnnnnnnnnnnnnnnnnnnnnnnnnnnnnnnnnnnnnnnnnnnnnnnnnnnnnnnnnnnnnnnnnnnnnnnnnnnnnnnnnnnnnnnnnnnnnnnnnnnnnnnnnnnnnnnnnnnnnnnnnnnnnnnnnnnnnnnnnnnnnnnnnnnnnnnnnnnnnnnnnnnnnnnnnnnnnnnnnnnnnnnnnnnnnnnnnnnnnnnnnnnnnnnnnnnnnnnnnnnnnnnnnnnnnnnnnnnnnnnnnnnnnnnnnnnnnnnnnnnnnnnnnnnnnnnnnnnnnnnnnnnnnnnnnnnnnnnnnnnnnnnnnnnnnnnnnnnnnnnnnnnnnnnnnnnnnnnnnnnnnnnnnnnnnnnnnnnnnnnnnnnnnnnnnnnnnnnnnnnnnnnnnnnnnnnnnnnnnnnnnnnnnnnnnnnnnnnnnnnnnnnnnnnnnnnnnnnnnnnnnnnnnnnnnnnnnnnnnnnnnnnnnnnnnnnnnnnnnnnnnnnnnnnnnnnnnnnnnnnnnnnnnnnnnnnnnnnnnnnnnnnnnnnnnnnnnnnnnnnnnnnnnnnnnnnnnnnnnnnnnnnnnnnnnnnnnnnnnnnnnnnnnnnnnnnnnnnnnnnnnnnnnnnnnnnnnnnnnnnnnnnnnnnnnnnnnnnnnnnnnnnnnnnnnnnnnnnnnnnnnnnnnnnnnnnnnnnnnnnnnnnnnnnnnnnnnnnnnnnnnnnnnnnnnnnnnnnnnnnnnnnnnnnnnnnnnnnnnnnnnnnnnnnnnnnnnnnnnnnnnnnnnnnnnnnnnnnnnnnnnnnnnnnnnnnnnnnnnnnnnnnnnnnnnnnnnnnnnnnnnnnnnnnnnnnnnnnnnnnnnnnnnnnnnnnnnnnnnnnnnnnnnnnnnnnnnnnnnnnnnnnnnnnnnnnnnnnnnnnnnnnnnnnnnnnnnnnnnnnnnnnnnnnnnnnnnnnnnnnnnnnnnnnnnnnnnnnnnnnnnnnnnnnnnnnnnnnnnnnnnnnnnnnnnnnnnnnnnnnnnnnnnnnnnnnnnnnnnnnnnnnnnnnnnnnnnnnnnnnnnnnnnnnnnnnnnnnnnnnnnnnnnnnnnnnnnnnnnnnnnnnnnnnnnnnnnnnnnnnnnnnnnnnnnnnnnnnnnnnnnnnnnnnnnnnnnnnnnnnnnnnnnnnnnnnnnnnnnnnnnnnnnnnnnnnnnnnnnnnnnnnnnnnnnnnnnnnnnnnnnnnnnnnnnnnnnnnnnnnnnnnnnnnnnnnnnnnnnnnnnnnnnnnnnnnnnnnnnnnnnnnnnnnnnnnnnnnnnnnnnnnnnnnnnnnnnnnnnnnnnnnnnnnnnnnnnnnnnnnnnnnnnnnnnnnnnnnnnnnnnnnnnnnnnnnnnnnnnnnnnnnnnnnnnnnnnnnnnnnnnnnnnnnnnnnnnnnnnnnnnnnnnnnnnnnnnnnnnnnnnnnnnnnnnnnnnnnnnnnnnnnnnnnnnnnnnnnnnnnnnnnnnnnnnnnnnnnnnnnnnnnnnnnnnnnnnnnnnnnnnnnnnnnnnnnnnnnnnnnnnnnnnnnnnnnnnnnnnnnnnnnnnnnnnnnnnnnnnnnnnnnnnnnnnnnnnnnnnnnnnnnnnnnnnnnnnnnnnnnnnnnnnnnnnnnnnnnnnnnnnnnnnnnnnnnnnnnnnnnnnnnnnnnnnnnnnnnnnnnnnnnnnnnnnnnnnnnnnnnnnnnnnnnnnnnnnnnnnnnnnnnnnnnnnnnnnnnnnnnnnnnnnnnnnnnnnnnnnnnnnnnnnnnnnnnnnnnnnnnnnnnnnnnnnnnnnnnnnnnnnnnnnnnnnnnnnnnnnnnnnnnnnnnnnnnnnnnnnnnnnnnnnnnnnnnnnnnnnnnnnnnnnnnnnnnnnnnnnnnnnnnnnnnnnnnnnnnnnnnnnnnnnnnnnnnnnnnnnnnnnnnnnnnnnnnnnnnnnnnnnnnnnnnnnnnnnnnnnnnnnnnnnnnnnnnnnnnnnnnnnnnnnnnnnnnnnnnnnnnnnnnnnnnnnnnnnnnnnnnnnnnnnnnnnnnnnnnnnnnnnnnnnnnnnnnnnnnnnnnnnnnnnnnnnnnnnnnnnnnnnnnnnnnnnnnnnnnnnnnnnnnnnnnnnnnnnnnnnnnnnnnnnnnnnnnnnnnnnnnnnnnnnnnnnnnnnnnnnnnnnnnnnnnnnnnnnnnnnnnnnnnnnnnnnnnnnnnnnnnnnnnnnnnnnnnnnnnnnnnnnnnnnnnnnnnnnnnnnnnnnnnnnnnnnnnnnnnnnnnnnnnnnnnnnnnnnnnnnnnnnnnnnnnnnnnnnnnnnnnnnnnnnnnnnnnnnnnnnnnnnnnnnnnnnnnnnnnnnnnnnnnnnnnnnnnnnnnnnnnnnnnnnnnnnnnnnnnnnnnnnnnnnnnnnnnnnnnnnnnnnnnnnnnnnnnnnnnnnnnnnnnnnnnnnnnnnnnnnnnnnnnnnnnnnnnnnnnnnnnnnnnnnnnnnnnnnnnnnnnnnnnnnnnnnnnnnnnnnnnnnnnnnnnnnnnnnnnnnnnnnnnnnnnnnnnnnnnnnnnnnnnnnnnnnnnnnnnnnnnnnnnnnnnnnnnnnnnnnnnnnnnnnnnnnnnnnnnnnnnnnnnnnnnnnnnnnnnnnnnnnnnnnnnnnnnnnnnnnnnnnnnnnnnnnnnnnnnnnnnnnnnnnnnnnnnnnnnnnnnnnnnnnnnnnnnnnnnnnnnnnnnnnnnnnnnnnnnnnnnnnnnnnnnnnnnnnnnnnnnnnnnnnnnnnnnnnnnnnnnnnnnnnnnnnnnnnnnnnnnnnnnnnnnnnnnnnnnnnnnnnnnnnnnnnnnnnnnnnnnnnnnnnnnnnnnnnnnnnnnnnnnnnnnnnnnnnnnnnnnnnnnnnnnnnnnnnnnnnnnnnnnnnnnnnnnnnnnnnnnnnnnnnnnnnnnnnnnnnnnnnnnnnnnnnnnnnnnnnnnnnnnnnnnnnnnnnnnnnnnnnnnnnnnnnnnnnnnnnnnnnnnnnnnnnnnnnnnnnnnnnnnnnnnnnnnnnnnnnnnnnnnnnnnnnnnnnnnnnnnnnnnnnnnnnnnnnnnnnnnnnnnnnnnnnnnnnnnnnnnnnnnnnnnnnnnnnnnnnnnnnnnnnnnnnnnnnnnnnnnnnnnnnnnnnnnnnnnnnnnnnnnnnnnnnnnnnnnnnnnnnnnnnnnnnnnnnnnnnnnnnnnnnnnnnnnnnnnnnnnnnnnnnnnnnnnnnnnnnnnnnnnnnnnnnnnnnnnnnnnnnnnnnnnnnnnnnnnnnnnnnnnnnnnnnnnnnnnnnnnnnnnnnnnnnnnnnnnnnnnnnnnnnnnnnnnnnnnnnnnnnnnnnnnnnnnnnnnnnnnnnnnnnnnnnnnnnnnnnnnnnnnnnnnnnnnnnnnnnnnnnnnnnnnnnnnnnnnnnnnnnnnnnnnnnnnnnnnnnnnnnnnnnnnnnnnnnnnnnnnnnnnnnnnnnnnnnnnnnnnnnnnnnnnnnnnnnnnnnnnnnnnnnnnnnnnnnnnnnnnnnnnnnnnnnnnnnnnnnnnnnnnnnnnnnnnnnnnnnnnnnnnnnnnnnnnnnnnnnnnnnnnnnnnnnnnnnnnnnnnnnnnnnnnnnnnnnnnnnnnnnnnnnnnnnnnnnnnnnnnnnnnnnnnnnnnnnnnnnnnnnnnnnnnnnnnnnnnnnnnnnnnnnnnnnnnnnnnnnnnnnnnnnnnnnnnnnnnnnnnnnnnnnnnnnnnnnnnnnnnnnnnnnnnnnnnnnnnnnnnnnnnnnnnnnnnnnnnnnnnnnnnnnnnnnnnnnnnnnnnnnnnnnnnnnnnnnnnnnnnnnnnnnnnnnnnnnnnnnnnnnnnnnnnnnnnnnnnnnnnnnnnnnnnnnnnnnnnnnnnnnnnnnnnnnnnnnnnnnnnnnnnnnnnnnnnnnnnnnnnnnnnnnnnnnnnnnnnnnnnnnnnnnnnnnnnnnnnnnnnnnnnnnnnnnnnnnnnnnnnnnnnnnnnnnnnnnnnnnnnnnnnnnnnnnnnnnnnnnnnnnnnnnnnnnnnnnnnnnnnnnnnnnnnnnnnnnnnnnnnnnnnnnnnnnnnnnnnnnnnnnnnnnnnnnnnnnnnnnnnnnnnnnnnnnnnnnnnnnnnnnnnnnnnnnnnnnnnnnnnnnnnnnnnnnnnnnnnnnnnnnnnnnnnnnnnnnnnnnnnnnnnnnnnnnnnnnnnnnnnnnnnnnnnnnnnnnnnnnnnnnnnnnnnnnnnnnnnnnnnnnnnnnnnnnnnnnnnnnnnnnnnnnnnnnnnnnnnnnnnnnnnnnnnnnnnnnnnnnnnnnnnnnnnnnnnnnnnnnnnnnnnnnnnnnnnnnnnnnnnnnnnnnnnnnnnnnnnnnnnnnnnnnnnnnnnnnnnnnnnnnnnnnnnnnnnnnnnnnnnnnnnnnnnnnnnnnnnnnnnnnnnnnnnnnnnnnnnnnnnnnnnnnnnnnnnnnnnnnnnnnnnnnnnnnnnnnnnnnnnnnnnnnnnnnnnnnnnnnnnnnnnnnnnnnnnnnnnnnnnnnnnnnnnnnnnnnnnnnnnnnnnnnnnnnnnnnnnnnnnnnnnnnnnnnnnnnnnnnnnnnnnnnnnnnnnnnnnnnnnnnnnnnnnnnnnnnnnnnnnnnnnnnnnnnnnnnnnnnnnnnnnnnnnnnnnnnnnnnnnnnnnnnnnnnnnnnnnnnnnnnnnnnnnnnnnnnnnnnnnnnnnnnnnnnnnnnnnnnnnnnnnnnnnnnnnnnnnnnnnnnnnnnnnnnnnnnnnnnnnnnnnnnnnnnnnnnnnnnnnnnnnnnnnnnnnnnnnnnnnnnnnnnnnnnnnnnnnnnnnnnnnnnnnnnnnnnnnnnnnnnnnnnnnnnnnnnnnnnnnnnnnnnnnnnnnnnnnnnnnnnnnnnnnnnnnnnnnnnnnnnnnnnnnnnnnnnnnnnnnnnnnnnnnnnnnnnnnnnnnnnnnnnnnnnnnnnnnnnnnnnnnnnnnnnnnnnnnnnnnnnnnnnnnnnnnnnnnnnnnnnnnnnnnnnnnnnnnnnnnnnnnnnnnnnnnnnnnnnnnnnnnnnnnnnnnnnnnnnnnnnnnnnnnnnnnnnnnnnnnnnnnnnnnnnnnnnnnnnnnnnnnnnnnnnnnnnnnnnnnnnnnnnnnnnnnnnnnnnnnnnnnnnnnnnnnnnnnnnnnnnnnnnnnnnnnnnnnnnnnnnnnnnnnnnnnnnnnnnnnnnnnnnnnnnnnnnnnnnnnnnnnnnnnnnnnnnnnnnnnnnnnnnnnnnnnnnnnnnnnnnnnnnnnnnnnnnnnnnnnnnnnnnnnnnnnnnnnnnnnnnnnnnnnnnnnnnnnnnnnnnnnnnnnnnnnnnnnnnnnnnnnnnnnnnnnnnnnnnnnnnnnnnnnnnnnnnnnnnnnnnnnnnnnnnnnnnnnnnnnnnnnnnnnnnnnnnnnnnnnnnnnnnnnnnnnnnnnnnnnnnnnnnnnnnnnnnnnnnnnnnnnnnnnnnnnnnnnnnnnnnnnnnnnnnnnnnnnnnnnnnnnnnnnnnnnnnnnnnnnnnnnnnnnnnnnnnnnnnnnnnnnnnnnnnnnnnnnnnnnnnnnnnnnnnnnnnnnnnnnnnnnnnnnnnnnnnnnnnnnnnnnnnnnnnnnnnnnnnnnnnnnnnnnnnnnnnnnnnnnnnnnnnnnnnnnnnnnnnnnnnnnnnnnnnnnnnnnnnnnnnnnnnnnnnnnnnnnnnnnnnnnnnnnnnnnnnnnnnnnnnnnnnnnnnnnnnnnnnnnnnnnnnnnnnnnnnnnnnnnnnnnnnnnnnnnnnnnnnnnnnnnnnnnnnnnnnnnnnnnnnnnnnnnnnnnnnnnnnnnnnnnnnnnnnnnnnnnnnnnnnnnnnnnnnnnnnnnnnnnnnnnnnnnnnnnnnnnnnnnnnnnnnnnnnnnnnnnnnnnnnnnnnnnnnnnnnnnnnnnnnnnnnnnnnnnnnnnnnnnnnnnnnnnnnnnnnnnnnnnnnnnnnnnnnnnnnnnnnnnnnnnnnnnnnnnnnnnnnnnnnnnnnnnnnnnnnnnnnnnnnnnnnnnnnnnnnnnnnnnnnnnnnnnnnnnnnnnnnnnnnnnnnnnnnnnnnnnnnnnnnnnnnnnnnnnnnnnnnnnnnnnnnnnnnnnnnnnnnnnnnnnnnnnnnnnnnnnnnnnnnnnnnnnnnnnnnnnnnnnnnnnnnnnnnnnnnnnnnnnnnnnnnnnnnnnnnnnnnnnnnnnnnnnnnnnnnnnnnnnnnnnnnnnnnnnnnnnnnnnnnnnnnnnnnnnnnnnnnnnnnnnnnnnnnnnnnnnnnnnnnnnnnnnnnnnnnnnnnnnnnnnnnnnnnnnnnnnnnnnnnnnnnnnnnnnnnnnnnnnnnnnnnnnnnnnnnnnnnnnnnnnnnnnnnnnnnnnnnnnnnnnnnnnnnnnnnnnnnnnnnnnnnnnnnnnnnnnnnnnnnnnnnnnnnnnnnnnnnnnnnnnnnnnnnnnnnnnnnnnnnnnnnnnnnnnnnnnnnnnnnnnnnnnnnnnnnnnnnnnnnnnnnnnnnnnnnnnnnnnnnnnnnnnnnnnnnnnnnnnnnnnnnnnnnnnnnnnnnnnnnnnnnnnnnnnnnnnnnnnnnnnnnnnnnnnnnnnnnnnnnnnnnnnnnnnnnnnnnnnnnnnnnnnnnnnnnnnnnnnnnnnnnnnnnnnnnnnnnnnnnnnnnnnnnnnnnnnnnnnnnnnnnnnnnnnnnnnnnnnnnnnnnnnnnnnnnnnnnnnnnnnnnnnnnnnnnnnnnnnnnnnnnnnnnnnnnnnnnnnnnnnnnnnnnnnnnnnnnnnnnnnnnnnnnnnnnnnnnnnnnnnnnnnnnnnnnnnnnnnnnnnnnnnnnnnnnnnnnnnnnnnnnnnnnnnnnnnnnnnnnnnnnnnnnnnnnnnnnnnnnnnnnnnnnnnnnnnnnnnnnnnnnnnnnnnnnnnnnnnnnnnnnnnnnnnnnnnnnnnnnnnnnnnnnnnnnnnnnnnnnnnnnnnnnnnnnnnnnnnnnnnnnnnnnnnnnnnnnnnnnnnnnnnnnnnnnnnnnnnnnnnnnnnnnnnnnnnnnnnnnnnnnnnnnnnnnnnnnnnnnnnnnnnnnnnnnnnnnnnnnnnnnnnnnnnnnnnnnnnnnnnnnnnnnnnnnnnnnnnnnnnnnnnnnnnnnnnnnnnnnnnnnnnnnnnnnnnnnnnnnnnnnnnnnnnnnnnnnnnnnnnnnnnnnnnnnnnnnnnnnnnnnnnnnnnnnnnnnnnnnnnnnnnnnnnnnnnnnnnnnnnnnnnnnnnnnnnnnnnnnnnnnnnnnnnnnnnnnnnnnnnnnnnnnnnnnnnnnnnnnnnnnnnnnnnnnnnnnnnnnnnnnnnnnnnnnnnnnnnnnnnnnnnnnnnnnnnnnnnnnnnnnnnnnnnnnnnnnnnnnnnnnnnnnnnnnnnnnnnnnnnnnnnnnnnnnnnnnnnnnnnnnnnnnnnnnnnnnnnnnnnnnnnnnnnnnnnnnnnnnnnnnnnnnnnnnnnnnnnnnnnnnnnnnnnnnnnnnnnnnnnnnnnnnnnnnnnnnnnnnnnnnnnnnnnnnnnnnnnnnnnnnnnnnnnnnnnnnnnnnnnnnnnnnnnnnnnnnnnnnnnnnnnnnnnnnnnnnnnnnnnnnnnnnnnnnnnnnnnnnnnnnnnnnnnnnnnnnnnnnnnnnnnnnnnnnnnnnnnnnnnnnnnnnnnnnnnnnnnnnnnnnnnnnnnnnnnnnnnnnnnnnnnnnnnnnnnnnnnnnnnnnnnnnnnnnnnnnnnnnnnnnnnnnnnnnnnnnnnnnnnnnnnnnnnnnnnnnnnnnnnnnnnnnnnnnnnnnnnnnnnnnnnnnnnnnnnnnnnnnnnnnnnnnnnnnnnnnnnnnnnnnnnnnnnnnnnnnnnnnnnnnnnnnnnnnnnnnnnnnnnnnnnnnnnnnnnnnnnnnnnnnnnnnnnnnnnnnnnnnnnnnnnnnnnnnnnnnnnnnnnnnnnnnnnnnnnnnnnnnnnnnnnnnnnnnnnnnnnnnnnnnnnnnnnnnnnnnnnnnnnnnnnnnnnnnnnnnnnnnnnnnnnnnnnnnnnnnnnnnnnnnnnnnnnnnnnnnnnnnnnnnnnnnnnnnnnnnnnnnnnnnnnnnnnnnnnnnnnnnnnnnnnnnnnnnnnnnnnnnnnnnnnnnnnnnnnnnnnnnnnnnnnnnnnnnnnnnnnnnnnnnnnnnnnnnnnnnnnnnnnnnnnnnnnnnnnnnnnnnnnnnnnnnnnnnnnnnnnnnnnnnnnnnnnnnnnnnnnnnnnnnnnnnnnnnnnnnnnnnnnnnnnnnnnnnnnnnnnnnnnnnnnnnnnnnnnnnnnnnnnnnnnnnnnnnnnnnnnnnnnnnnnnnnnnnnnnnnnnnnnnnnnnnnnnnnnnnnnnnnnnnnnnnnnnnnnnnnnnnnnnnnnnnnnnnnnnnnnnnnnnnnnnnnnnnnnnnnnnnnnnnnnnnnnnnnnnnnnnnnnnnnnnnnnnnnnnnnnnnnnnnnnnnnnnnnnnnnnnnnnnnnnnnnnnnnnnnnnnnnnnnnnnnnnnnnnnnnnnnnnnnnnnnnnnnnnnnnnnnnnnnnnnnnnnnnnnnnnnnnnnnnnnnnnnnnnnnnnnnnnnnnnnnnnnnnnnnnnnnnnnnnnnnnnnnnnnnnnnnnnnnnnnnnnnnnnnnnnnnnnnnnnnnnnnnnnnnnnnnnnnnnnnnnnnnnnnnnnnnnnnnnnnnnnnnnnnnnnnnnnnnnnnnnnnnnnnnnnnnnnnnnnnnnnnnnnnnnnnnnnnnnnnnnnnnnnnnnnnnnnnnnnnnnnnnnnnnnnnnnnnnnnnnnnnnnnnnnnnnnnnnnnnnnnnnnnnnnnnnnnnnnnnnnnnnnnnnnnnnnnnnnnnnnnnnnnnnnnnnnnnnnnnnnnnnnnnnnnnnnnnnnnnnnnnnnnnnnnnnnnnnnnnnnnnnnnnnnnnnnnnnnnnnnnnnnnnnnnnnnnnnnnnnnnnnnnnnnnnnnnnnnnnnnnnnnnnnnnnnnnnnnnnnnnnnnnnnnnnnnnnnnnnnnnnnnnnnnnnnnnnnnnnnnnnnnnnnnnnnnnnnnnnnnnnnnnnnnnnnnnnnnnnnnnnnnnnnnnnnnnnnnnnnnnnnnnnnnnnnnnnnnnnnnnnnnnnnnnnnnnnnnnnnnnnnnnnnnnnnnnnnnnnnnnnnnnnnnnnnnnnnnnnnnnnnnnnnnnnnnnnnnnnnnnnnnnnnnnnnnnnnnnnnnnnnnnnnnnnnnnnnnnnnnnnnnnnnnnnnnnnnnnnnnnnnnnnnnnnnnnnnnnnnnnnnnnnnnnnnnnnnnnnnnnnnnnnnnnnnnnnnnnnnnnnnnnnnnnnnnnnnnnnnnnnnnnnnnnnnnnnnnnnnnnnnnnnnnnnnnnnnnnnnnnnnnnnnnnnnnnnnnnnnnnnnnnnnnnnnnnnnnnnnnnnnnnnnnnnnnnnnnnnnnnnnnnnnnnnnnnnnnnnnnnnnnnnnnnnnnnnnnnnnnnnnnnnnnnnnnnnnnnnnnnnnnnnnnnnnnnnnnnnnnnnnnnnnnnnnnnnnnnnnnnnnnnnnnnnnnnnnnnnnnnnnnnnnnnnnnnnnnnnnnnnnnnnnnnnnnnnnnnnnnnnnnnnnnnnnnnnnnnnnnnnnnnnnnnnnnnnnnnnnnnnnnnnnnnnnnnnnnnnnnnnnnnnnnnnnnnnnnnnnnnnnnnnnnnnnnnnnnnnnnnnnnnnnnnnnnnnnnnnnnnnnnnnnnnnnnnnnnnnnnnnnnnnnnnnnnnnnnnnnnnnnnnnnnnnnnnnnnnnnnnnnnnnnnnnnnnnnnnnnnnnnnnnnnnnnnnnnnnnnnnnnnnnnnnnnnnnnnnnnnnnnnnnnnnnnnnnnnnnnnnnnnnnnnnnnnnnnnnnnnnnnnnnnnnnnnnnnnnnnnnnnnnnnnnnnnnnnnnnnnnnnnnnnnnnnnnnnnnnnnnnnnnnnnnnnnnnnnnnnnnnnnnnnnnnnnnnnnnnnnnnnnnnnnnnnnnnnnnnnnnnnnnnnnnnnnnnnnnnnnnnnnnnnnnnnnnnnnnnnnnnnnnnnnnnnnnnnnnnnnnnnnnnnnnnnnnnnnnnnnnnnnnnnnnnnnnnnnnnnnnnnnnnnnnnnnnnnnnnnnnnnnnnnnnnnnnnnnnnnnnnnnnnnnnnnnnnnnnnnnnnnnnnnnnnnnnnnnnnnnnnnnnnnnnnnnnnnnnnnnnnnnnnnnnnnnnnnnnnnnnnnnnnnnnnnnnnnnnnnnnnnnnnnnnnnnnnnnnnnnnnnnnnnnnnnnnnnnnnnnnnnnnnnnnnnnnnnnnnnnnnnnnnnnnnnnnnnnnnnnnnnnnnnnnnnnnnnnnnnnnnnnnnnnnnnnnnnnnnnnnnnnnnnnnnnnnnnnnnnnnnnnnnnnnnnnnnnnnnnnnnnnnnnnnnnnnnnnnnnnnnnnnnnnnnnnnnnnnnnnnnnnnnnnnnnnnnnnnnnnnnnnnnnnnnnnnnnnnnnnnnnnnnnnnnnnnnnnnnnnnnnnnnnnnnnnnnnnnnnnnnnnnnnnnnnnnnnnnnnnnnnnnnnnnnnnnnnnnnnnnnnnnnnnnnnnnnnnnnnnnnnnnnnnnnnnnnnnnnnnnnnnnnnnnnnnnnnnnnnnnnnnnnnnnnnnnnnnnnnnnnnnnnnnnnnnnnnnnnnnnnnnnnnnnnnnnnnnnnnnnnnnnnnnnnnnnnnnnnnnnnnnnnnnnnnnnnnnnnnnnnnnnnnnnnnnnnnnnnnnnnnnnnnnnnnnnnnnnnnnnnnnnnnnnnnnnnnnnnnnnnnnnnnnnnnnnnnnnnnnnnnnnnnnnnnnnnnnnnnnnnnnnnnnnnnnnnnnnnnnnnnnnnnnnnnnnnnnnnnnnnnnnnnnnnnnnnnnnnnnnnnnnnnnnnnnnnnnnnnnnnnnnnnnnnnnnnnnnnnnnnnnnnnnnnnnnnnnnnnnnnnnnnnnnnnnnnnnnnnnnnnnnnnnnnnnnnnnnnnnnnnnnnnnnnnnnnnnnnnnnnnnnnnnnnnnnnnnnnnnnnnnnnnnnnnnnnnnnnnnnnnnnnnnnnnnnnnnnnnnnnnnnnnnnnnnnnnnnnnnnnnnnnnnnnnnnnnnnnnnnnnnnnnnnnnnnnnnnnnnnnnnnnnnnnnnnnnnnnnnnnnnnnnnnnnnnnnnnnnnnnnnnnnnnnnnnnnnnnnnnnnnnnnnnnnnnnnnnnnnnnnnnnnnnnnnnnnnnnnnnnnnnnnnnnnnnnnnnnnnnnnnnnnnnnnnnnnnnnnnnnnnnnnnnnnnnnnnnnnnnnnnnnnnnnnnnnnnnnnnnnnnnnnnnnnnnnnnnnnnnnnnnnnnnnnnnnnnnnnnnnnnnnnnnnnnnnnnnnnnnnnnnnnnnnnnnnnnnnnnnnnnnnnnnnnnnnnnnnnnnnnnnnnnnnnnnnnnnnnnnnnnnnnnnnnnnnnnnnnnnnnnnnnnnnnnnnnnnnnnnnnnnnnnnnnnnnnnnnnnnnnnnnnnnnnnnnnnnnnnnnnnnnnnnnnnnnnnnnnnnnnnnnnnnnnnnnnnnnnnnnnnnnnnnnnnnnnnnnnnnnnnnnnnnnnnnnnnnnnnnnnnnnnnnnnnnnnnnnnnnnnnnnnnnnnnnnnnnnnnnnnnnnnnnnnnnnnnnnnnnnnnnnnnnnnnnnnnnnnnnnnnnnnnnnnnnnnnnnnnnnnnnnnnnnnnnnnnnnnnnnnnnnnnnnnnnnnnnnnnnnnnnnnnnnnnnnnnnnnnnnnnnnnnnnnnnnnnnnnnnnnnnnnnnnnnnnnnnnnnnnnnnnnnnnnnnnnnnnnnnnnnnnnnnnnnnnnnnnnnnnnnnnnnnnnnnnnnnnnnnnnnnnnnnnnnnnnnnnnnnnnnnnnnnnnnnnnnnnnnnnnnnnnnnnnnnnnnnnnnnnnnnnnnnnnnnnnnnnnnnnnnnnnnnnnnnnnnnnnnnnnnnnnnnnnnnnnnnnnnnnnnnnnnnnnnnnnnnnnnnnnnnnnnnnnnnnnnnnnnnnnnnnnnnnnnnnnnnnnnnnnnnnnnnnnnnnnnnnnnnnnnnnnnnnnnnnnnnnnnnnnnnnnnnnnnnnnnnnnnnnnnnnnnnnnnnnnnnnnnnnnnnnnnnnnnnnnnnnnnnnnnnnnnnnnnnnnnnnnnnnnnnnnnnnnnnnnnnnnnnnnnnnnnnnnnnnnnnnnnnnnnnnnnnnnnnnnnnnnnnnnnnnnnnnnnnnnnnnnnnnnnnnnnnnnnnnnnnnnnnnnnnnnnnnnnnnnnnnnnnnnnnnnnnnnnnnnnnnnnnnnnnnnnnnnnnnnnnnnnnnnnnnnnnnnnnnnnnnnnnnnnnnnnnnnnnnnnnnnnnnnnnnnnnnnnnnnnnnnnnnnnnnnnnnnnnnnnnnnnnnnnnnnnnnnnnnnnnnnnnnnnnnnnnnnnnnnnnnnnnnnnnnnnnnnnnnnnnnnnnnnnnnnnnnnnnnnnnnnnnnnnnnnnnnnnnnnnnnnnnnnnnnnnnnnnnnnnnnnnnnnnnnnnnnnnnnnnnnnnnnnnnnnnnnnnnnnnnnnnnnnnnnnnnnnnnnnnnnnnnnnnnnnnnnnnnnnnnnnnnnnnnnnnnnnnnnnnnnnnnnnnnnnnnnnnnnnnnnnnnnnnnnnnnnnnnnnnnnnnnnnnnnnnnnnnnnnnnnnnnnnnnnnnnnnnnnnnnnnnnnnnnnnnnnnnnnnnnnnnnnnnnnnnnnnnnnnnnnnnnnnnnnnnnnnnnnnnnnnnnnnnnnnnnnnnnnnnnnnnnnnnnnnnnnnnnnnnnnnnnnnnnnnnnnnnnnnnnnnnnnnnnnnnnnnnnnnnnnnnnnnnnnnnnnnnnnnnnnnnnnnnnnnnnnnnnnnnnnnnnnnnnnnnnnnnnnnnnnnnnnnnnnnnnnnnnnnnnnnnnnnnnnnnnnnnnnnnnnnnnnnnnnnnnnnnnnnnnnnnnnnnnnnnnnnnnnnnnnnnnnnnnnnnnnnnnnnnnnnnnnnnnnnnnnnnnnnnnnnnnnnnnnnnnnnnnnnnnnnnnnnnnnnnnnnnnnnnnnnnnnnnnnnnnnnnnnnnnnnnnnnnnnnnnnnnnnnnnnnnnnnnnnnnnnnnnnnnnnnnnnnnnnnnnnnnnnnnnnnnnnnnnnnnnnnnnnnnnnnnnnnnnnnnnnnnnnnnnnnnnnnnnnnnnnnnnnnnnnnnnnnnnnnnnnnnnnnnnnnnnnnnnnnnnnnnnnnnnnnnnnnnnnnnnnnnnnnnnnnnnnnnnnnnnnnnnnnnnnnnnnnnnnnnnnnnnnnnnnnnnnnnnnnnnnnnnnnnnnnnnnnnnnnnnnnnnnnnnnnnnnnnnnnnnnnnnnnnnnnnnnnnnnnnnnnnnnnnnnnnnnnnnnnnnnnnnnnnnnnnnnnnnnnnnnnnnnnnnnnnnnnnnnnnnnnnnnnnnnnnnnnnnnnnnnnnnnnnnnnnnnnnnnnnnnnnnnnnnnnnnnnnnnnnnnnnnnnnnnnnnnnnnnnnnnnnnnnnnnnnnnnnnnnnnnnnnnnnnnnnnnnnnnnnnnnnnnnnnnnnnnnnnnnnnnnnnnnnnnnnnnnnnnnnnnnnnnnnnnnnnnnnnnnnnnnnnnnnnnnnnnnnnnnnnnnnnnnnnnnnnnnnnnnnnnnnnnnnnnnnnnnnnnnnnnnnnnnnnnnnnnnnnnnnnnnnnnnnnnnnnnnnnnnnnnnnnnnnnnnnnnnnnnnnnnnnnnnnnnnnnnnnnnnnnnnnnnnnnnnnnnnnnnnnnnnnnnnnnnnnnnnnnnnnnnnnnnnnnnnnnnnnnnnnnnnnnnnnnnnnnnnnnnnnnnnnnnnnnnnnnnnnnnnnnnnnnnnnnnnnnnnnnnnnnnnnnnnnnnnnnnnnnnnnnnnnnnnnnnnnnnnnnnnnnnnnnnnnnnnnnnnnnnnnnnnnnnnnnnnnnnnnnnnnnnnnnnnnnnnnnnnnnnnnnnnnnnnnnnnnnnnnnnnnnnnnnnnnnnnnnnnnnnnnnnnnnnnnnnnnnnnnnnnnnnnnnnnnnnnnnnnnnnnnnnnnnnnnnnnnnnnnnnnnnnnnnnnnnnnnnnnnnnnnnnnnnnnnnnnnnnnnnnnnnnnnnnnnnnnnnnnnnnnnnnnnnnnnnnnnnnnnnnnnnnnnnnnnnnnnnnnnnnnnnnnnnnnnnnnnnnnnnnnnnnnnnnnnnnnnnnnnnnnnnnnnnnnnnnnnnnnnnnnnnnnnnnnnnnnnnnnnnnnnnnnnnnnnnnnnnnnnnnnnnnnnnnnnnnnnnnnnnnnnnnnnnnnnnnnnnnnnnnnnnnnnnnnnnnnnnnnnnnnnnnnnnnnnnnnnnnnnnnnnnnnnnnnnnnnnnnnnnnnnnnnnnnnnnnnnnnnnnnnnnnnnnnnnnnnnnnnnnnnnnnnnnnnnnnnnnnnnnnnnnnnnnnnnnnnnnnnnnnnnnnnnnnnnnnnnnnnnnnnnnnnnnnnnnnnnnnnnnnnnnnnnnnnnnnnnnnnnnnnnnnnnnnnnnnnnnnnnnnnnnnnnnnnnnnnnnnnnnnnnnnnnnnnnnnnnnnnnnnnnnnnnnnnnnnnnnnnnnnnnnnnnnnnnnnnnnnnnnnnnnnnnnnnnnnnnnnnnnnnnnnnnnnnnnnnnnnnnnnnnnnnnnnnnnnnnnnnnnnnnnnnnnnnnnnnnnnnnnnnnnnnnnnnnnnnnnnnnnnnnnnnnnnnnnnnnnnnnnnnnnnnnnnnnnnnnnnnnnnnnnnnnnnnnnnnnnnnnnnnnnnnnnnnnnnnnnnnnnnnnnnnnnnnnnnnnnnnnnnnnnnnnnnnnnnnnnnnnnnnnnnnnnnnnnnnnnnnnnnnnnnnnnnnnnnnnnnnnnnnnnnnnnnnnnnnnnnnnnnnnnnnnnnnnnnnnnnnnnnnnnnnnnnnnnnnnnnnnnnnnnnnnnnnnnnnnnnnnnnnnnnnnnnnnnnnnnnnnnnnnnnnnnnnnnnnnnnnnnnnnnnnnnnnnnnnnnnnnnnnnnnnnnnnnnnnnnnnnnnnnnnnnnnnnnnnnnnnnnnnnnnnnnnnnnnnnnnnnnnnnnnnnnnnnnnnnnnnnnnnnnnnnnnnnnnnnnnnnnnnnnnnnnnnnnnnnnnnnnnnnnnnnnnnnnnnnnnnnnnnnnnnnnnnnnnnnnnnnnnnnnnnnnnnnnnnnnnnnnnnnnnnnnnnnnnnnnnnnnnnnnnnnnnnnnnnnnnnnnnnnnnnnnnnnnnnnnnnnnnnnnnnnnnnnnnnnnnnnnnnnnnnnnnnnnnnnnnnnnnnnnnnnnnnnnnnnnnnnnnnnnnnnnnnnnnnnnnnnnnnnnnnnnnnnnnnnnnnnnnnnnnnnnnnnnnnnnnnnnnnnnnnnnnnnnnnnnnnnnnnnnnnnnnnnnnnnnnnnnnnnnnnnnnnnnnnnnnnnnnnnnnnnnnnnnnnnnnnnnnnnnnnnnnnnnnnnnnnnnnnnnnnnnnnnnnnnnnnnnnnnnnnnnnnnnnnnnnnnnnnnnnnnnnnnnnnnnnnnnnnnnnnnnnnnnnnnnnnnnnnnnnnnnnnnnnnnnnnnnnnnnnnnnnnnnnnnnnnnnnnnnnnnnnnnnnnnnnnnnnnnnnnnnnnnnnnnnnnnnnnnnnnnnnnnnnnnnnnnnnnnnnnnnnnnnnnnnnnnnnnnnnnnnnnnnnnnnnnnnnnnnnnnnnnnnnnnnnnnnnnnnnnnnnnnnnnnnnnnnnnnnnnnnnnnnnnnnnnnnnnnnnnnnnnnnnnnnnnnnnnnnnnnnnnnnnnnnnnnnnnnnnnnnnnnnnnnnnnnnnnnnnnnnnnnnnnnnnnnnnnnnnnnnnnnnnnnnnnnnnnnnnnnnnnnnnnnnnnnnnnnnnnnnnnnnnnnnnnnnnnnnnnnnnnnnnnnnnnnnnnnnnnnnnnnnnnnnnnnnnnnnnnnnnnnnnnnnnnnnnnnnnnnnnnnnnnnnnnnnnnnnnnnnnnnnnnnnnnnnnnnnnnnnnnnnnnnnnnnnnnnnnnnnnnnnnnnnnnnnnnnnnnnnnnnnnnnnnnnnnnnnnnnnnnnnnnnnnnnnnnnnnnnnnnnnnnnnnnnnnnnnnnnnnnnnnnnnnnnnnnnnnnnnnnnnnnnnnnnnnnnnnnnnnnnnnnnnnnnnnnnnnnnnnnnnnnnnnnnnnnnnnnnnnnnnnnnnnnnnnnnnnnnnnnnnnnnnnnnnnnnnnnnnnnnnnnnnnnnnnnnnnnnnnnnnnnnnnnnnnnnnnnnnnnnnnnnnnnnnnnnnnnnnnnnnnnnnnnnnnnnnnnnnnnnnnnnnnnnnnnnnnnnnnnnnnnnnnnnnnnnnnnnnnnnnnnnnnnnnnnnnnnnnnnnnnnnnnnnnnnnnnnnnnnnnnnnnnnnnnnnnnnnnnnnnnnnnnnnnnnnnnnnnnnnnnnnnnnnnnnnnnnnnnnnnnnnnnnnnnnnnnnnnnnnnnnnnnnnnnnnnnnnnnnnnnnnnnnnnnnnnnnnnnnnnnnnnnnnnnnnnnnnnnnnnnnnnnnnnnnnnnnnnnnnnnnnnnnnnnnnnnnnnnnnnnnnnnnnnnnnnnnnnnnnnnnnnnnnnnnnnnnnnnnnnnnnnnnnnnnnnnnnnnnnnnnnnnnnnnnnnnnnnnnnnnnnnnnnnnnnnnnnnnnnnnnnnnnnnnnnnnnnnnnnnnnnnnnnnnnnnnnnnnnnnnnnnnnnnnnnnnnnnnnnnnnnnnnnnnnnnnnnnnnnnnnnnnnnnnnnnnnnnnnnnnnnnnnnnnnnnnnnnnnnnnnnnnnnnnnnnnnnnnnnnnnnnnnnnnnnnnnnnnnnnnnnnnnnnnnnnnnnnnnnnnnnnnnnnnnnnnnnnnnnnnnnnnnnnnnnnnnnnnnnnnnnnnnnnnnnnnnnnnnnnnnnnnnnnnnnnnnnnnnnnnnnnnnnnnnnnnnnnnnnnnnnnnnnnnnnnnnnnnnnnnnnnnnnnnnnnnnnnnnnnnnnnnnnnnnnnnnnnnnnnnnnnnnnnnnnnnnnnnnnnnnnnnnnnnnnnnnnnnnnnnnnnnnnnnnnnnnnnnnnnnnnnnnnnnnnnnnnnnnnnnnnnnnnnnnnnnnnnnnnnnnnnnnnnnnnnnnnnnnnnnnnnnnnnnnnnnnnnnnnnnnnnnnnnnnnnnnnnnnnnnnnnnnnnnnnnnnnnnnnnnnnnnnnnnnnnnnnnnnnnnnnnnnnnnnnnnnnnnnnnnnnnnnnnnnnnnnnnnnnnnnnnnnnnnnnnnnnnnnnnnnnnnnnnnnnnnnnnnnnnnnnnnnnnnnnnnnnnnnnnnnnnnnnnnnnnnnnnnnnnnnnnnnnnnnnnnnnnnnnnnnnnnnnnnnnnnnnnnnnnnnnnnnnnnnnnnnnnnnnnnnnnnnnnnnnnnnnnnnnnnnnnnnnnnnnnnnnnnnnnnnnnnnnnnnnnnnnnnnnnnnnnnnnnnnnnnnnnnnnnnnnnnnnnnnnnnnnnnnnnnnnnnnnnnnnnnnnnnnnnnnnnnnnnnnnnnnnnnnnnnnnnnnnnnnnnnnnnnnnnnnnnnnnnnnnnnnnnnnnnnnnnnnnnnnnnnnnnnnnnnnnnnnnnnnnnnnnnnnnnnnnnnnnnnnnnnnnnnnnnnnnnnnnnnnnnnnnnnnnnnnnnnnnnnnnnnnnnnnnnnnnnnnnnnnnnnnnnnnnnnnnnnnnnnnnnnnnnnnnnnnnnnnnnnnnnnnnnnnnnnnnnnnnnnnnnnnnnnnnnnnnnnnnnnnnnnnnnnnnnnnnnnnnnnnnnnnnnnnnnnnnnnnnnnnnnnnnnnnnnnnnnnnnnnnnnnnnnnnnnnnnnnnnnnnnnnnnnnnnnnnnnnnnnnnnnnnnnnnnnnnnnnnnnnnnnnnnnnnnnnnnnnnnnnnnnnnnnnnnnnnnnnnnnnnnnnnnnnnnnnnnnnnnnnnnnnnnnnnnnnnnnnnnnnnnnnnnnnnnnnnnnnnnnnnnnnnnnnnnnnnnnnnnnnnnnnnnnnnnnnnnnnnnnnnnnnnnnnnnnnnnnnnnnnnnnnnnnnnnnnnnnnnnnnnnnnnnnnnnnnnnnnnnnnnnnnnnnnnnnnnnnnnnnnnnnnnnnnnnnnnnnnnnnnnnnnnnnnnnnnnnnnnnnnnnnnnnnnnnnnnnnnnnnnnnnnnnnnnnnnnnnnnnnnnnnnnnnnnnnnnnnnnnnnnnnnnnnnnnnnnnnnnnnnnnnnnnnnnnnnnnnnnnnnnnnnnnnnnnnnnnnnnnnnnnnnnnnnnnnnnnnnnnnnnnnnnnnnnnnnnnnnnnnnnnnnnnnnnnnnnnnnnnnnnnnnnnnnnnnnnnnnnnnnnnnnnnnnnnnnnnnnnnnnnnnnnnnnnnnnnnnnnnnnnnnnnnnnnnnnnnnnnnnnnnnnnnnnnnnnnnnnnnnnnnnnnnnnnnnnnnnnnnnnnnnnnnnnnnnnnnnnnnnnnnnnnnnnnnnnnnnnnnnnnnnnnnnnnnnnnnnnnnnnnnnnnnnnnnnnnnnnnnnnnnnnnnnnnnnnnnnnnnnnnnnnnnnnnnnnnnnnnnnnnnnnnnnnnnnnnnnnnnnnnnnnnnnnnnnnnnnnnnnnnnnnnnnnnnnnnnnnnnnnnnnnnnnnnnnnnnnnnnnnnnnnnnnnnnnnnnnnnnnnnnnnnnnnnnnnnnnnnnnnnnnnnnnnnnnnnnnnnnnnnnnnnnnnnnnnnnnnnnnnnnnnnnnnnnnnnnnnnnnnnnnnnnnnnnnnnnnnnnnnnnnnnnnnnnnnnnnnnnnnnnnnnnnnnnnnnnnnnnnnnnnnnnnnnnnnnnnnnnnnnnnnnnnnnnnnnnnnnnnnnnnnnnnnnnnnnnnnnnnnnnnnnnnnnnnnnnnnnnnnnnnnnnnnnnnnnnnnnnnnnnnnnnnnnnnnnnnnnnnnnnnnnnnnnnnnnnnnnnnnnnnnnnnnnnnnnnnnnnnnnnnnnnnnnnnnnnnnnnnnnnnnnnnnnnnnnnnnnnnnnnnnnnnnnnnnnnnnnnnnnnnnnnnnnnnnnnnnnnnnnnnnnnnnnnnnnnnnnnnnnnnnnnnnnnnnnnnnnnnnnnnnnnnnnnnnnnnnnnnnnnnnnnnnnnnnnnnnnnnnnnnnnnnnnnnnnnnnnnnnnnnnnnnnnnnnnnnnnnnnnnnnnnnnnnnnnnnnnnnnnnnnnnnnnnnnnnnnnnnnnnnnnnnnnnnnnnnnnnnnnnnnnnnnnnnnnnnnnnnnnnnnnnnnnnnnnnnnnnnnnnnnnnnnnnnnnnnnnnnnnnnnnnnnnnnnnnnnnnnnnnnnnnnnnnnnnnnnnnnnnnnnnnnnnnnnnnnnnnnnnnnnnnnnnnnnnnnnnnnnnnnnnnnnnnnnnnnnnnnnnnnnnnnnnnnnnnnnnnnnnnnnnnnnnnnnnnnnnnnnnnnnnnnnnnnnnnnnnnnnnnnnnnnnnnnnnnnnnnnnnnnnnnnnnnnnnnnnnnnnnnnnnnnnnnnnnnnnnnnnnnnnnnnnnnnnnnnnnnnnnnnnnnnnnnnnnnnnnnnnnnnnnnnnnnnnnnnnnnnnnnnnnnnnnnnnnnnnnnnnnnnnnnnnnnnnnnnnnnnnnnnnnnnnnnnnnnnnnnnnnnnnnnnnnnnnnnnnnnnnnnnnnnnnnnnnnnnnnnnnnnnnnnnnnnnnnnnnnnnnnnnnnnnnnnnnnnnnnnnnnnnnnnnnnnnnnnnnnnnnnnnnnnnnnnnnnnnnnnnnnnnnnnnnnnnnnnnnnnnnnnnnnnnnnnnnnnnnnnnnnnnnnnnnnnnnnnnnnnnnnnnnnnnnnnnnnnnnnnnnnnnnnnnnnnnnnnnnnnnnnnnnnnnnnnnnnnnnnnnnnnnnnnnnnnnnnnnnnnnnnnnnnnnnnnnnnnnnnnnnnnnnnnnnnnnnnnnnnnnnnnnnnnnnnnnnnnnnnnnnnnnnnnnnnnnnnnnnnnnnnnnnnnnnnnnnnnnnnnnnnnnnnnnnnnnnnnnnnnnnnnnnnnnnnnnnnnnnnnnnnnnnnnnnnnnnnnnnnnnnnnnnnnnnnnnnnnnnnnnnnnnnnnnnnnnnnnnnnnnnnnnnnnnnnnnnnnnnnnnnnnnnnnnnnnnnnnnnnnnnnnnnnnnnnnnnnnnnnnnnnnnnnnnnnnnnnnnnnnnnnnnnnnnnnnnnnnnnnnnnnnnnnnnnnnnnnnnnnnnnnnnnnnnnnnnnnnnnnnnnnnnnnnnnnnnnnnnnnnnnnnnnnnnnnnnnnnnnnnnnnnnnnnnnnnnnnnnnnnnnnnnnnnnnnnnnnnnnnnnnnnnnnnnnnnnnnnnnnnnnnnnnnnnnnnnnnnnnnnnnnnnnnnnnnnnnnnnnnnnnnnnnnnnnnnnnnnnnnnnnnnnnnnnnnnnnnnnnnnnnnnnnnnnnnnnnnnnnnnnnnnnnnnnnnnnnnnnnnnnnnnnnnnnnnnnnnnnnnnnnnnnnnnnnnnnnnnnnnnnnnnnnnnnnnnnnnnnnnnnnnnnnnnnnnnnnnnnnnnnnnnnnnnnnnnnnnnnnnnnnnnnnnnnnnnnnnnnnnnnnnnnnnnnnnnnnnnnnnnnnnnnnnnnnnnnnnnnnnnnnnnnnnnnnnnnnnnnnnnnnnnnnnnnnnnnnnnnnnnnnnnnnnnnnnnnnnnnnnnnnnnnnnnnnnnnnnnnnnnnnnnnnnnnnnnnnnnnnnnnnnnnnnnnnnnnnnnnnnnnnnnnnnnnnnnnnnnnnnnnnnnnnnnnnnnnnnnnnnnnnnnnnnnnnnnnnnnnnnnnnnnnnnnnnnnnnnnnnnnnnnnnnnnnnnnnnnnnnnnnnnnnnnnnnnnnnnnnnnnnnnnnnnnnnnnnnnnnnnnnnnnnnnnnnnnnnnnnnnnnnnnnnnnnnnnnnnnnnnnnnnnnnnnnnnnnnnnnnnnnnnnnnnnnnnnnnnnnnnnnnnnnnnnnnnnnnnnnnnnnnnnnnnnnnnnnnnnnnnnnnnnnnnnnnnnnnnnnnnnnnnnnnnnnnnnnnnnnnnnnnnnnnnnnnnnnnnnnnnnnnnnnnnnnnnnnnnnnnnnnnnnnnnnnnnnnnnnnnnnnnnnnnnnnnnnnnnnnnnnnnnnnnnnnnnnnnnnnnnnnnnnnnnnnnnnnnnnnnnnnnnnnnnnnnnnnnnnnnnnnnnnnnnnnnnnnnnnnnnnnnnnnnnnnnnnnnnnnnnnnnnnnnnnnnnnnnnnnnnnnnnnnnnnnnnnnnnnnnnnnnnnnnnnnnnnnnnnnnnnnnnnnnnnnnnnnnnnnnnnnnnnnnnnnnnnnnnnnnnnnnnnnnnnnnnnnnnnnnnnnnnnnnnnnnnnnnnnnnnnnnnnnnnnnnnnnnnnnnnnnnnnnnnnnnnnnnnnnnnnnnnnnnnnnnnnnnnnnnnnnnnnnnnnnnnnnnnnnnnnnnnnnnnnnnnnnnnnnnnnnnnnnnnnnnnnnnnnnnnnnnnnnnnnnnnnnnnnnnnnnnnnnnnnnnnnnnnnnnnnnnnnnnnnnnnnnnnnnnnnnnnnnnnnnnnnnnnnnnnnnnnnnnnnnnnnnnnnnnnnnnnnnnnnnnnnnnnnnnnnnnnnnnnnnnnnnnnnnnnnnnnnnnnnnnnnnnnnnnnnnnnnnnnnnnnnnnnnnnnnnnnnnnnnnnnnnnnnnnnnnnnnnnnnnnnnnnnnnnnnnnnnnnnnnnnnnnnnnnnnnnnnnnnnnnnnnnnnnnnnnnnnnnnnnnnnnnnnnnnnnnnnnnnnnnnnnnnnnnnnnnnnnnnnnnnnnnnnnnnnnnnnnnnnnnnnnnnnnnnnnnnnnnnnnnnnnnnnnnnnnnnnnnnnnnnnnnnnnnnnnnnnnnnnnnnnnnnnnnnnnnnnnnnnnnnnnnnnnnnnnnnnnnnnnnnnnnnnnnnnnnnnnnnnnnnnnnnnnnnnnnnnnnnnnnnnnnnnnnnnnnnnnnnnnnnnnnnnnnnnnnnnnnnnnnnnnnnnnnnnnnnnnnnnnnnnnnnnnnnnnnnnnnnnnnnnnnnnnnnnnnnnnnnnnnnnnnnnnnnnnnnnnnnnnnnnnnnnnnnnnnnnnnnnnnnnnnnnnnnnnnnnnnnnnnnnnnnnnnnnnnnnnnnnnnnnnnnnnnnnnnnnnnnnnnnnnnnnnnnnnnnnnnnnnnnnnnnnnnnnnnnnnnnnnnnnnnnnnnnnnnnnnnnnnnnnnnnnnnnnnnnnnnnnnnnnnnnnnnnnnnnnnnnnnnnnnnnnnnnnnnnnnnnnnnnnnnnnnnnnnnnnnnnnnnnnnnnnnnnnnnnnnnnnnnnnnnnnnnnnnnnnnnnnnnnnnnnnnnnnnnnnnnnnnnnnnnnnnnnnnnnnnnnnnnnnnnnnnnnnnnnnnnnnnnnnnnnnnnnnnnnnnnnnnnnnnnnnnnnnnnnnnnnnnnnnnnnnnnnnnnnnnnnnnnnnnnnnnnnnnnnnnnnnnnnnnnnnnnnnnnnnnnnnnnnnnnnnnnnnnnnnnnnnnnnnnnnnnnnnnnnnnnnnnnnnnnnnnnnnnnnnnnnnnnnnnnnnnnnnnnnnnnnnnnnnnnnnnnnnnnnnnnnnnnnnnnnnnnnnnnnnnnnnnnnnnnnnnnnnnnnnnnnnnnnnnnnnnnnnnnnnnnnnnnnnnnnnnnnnnnnnnnnnnnnnnnnnnnnnnnnnnnnnnnnnnnnnnnnnnnnnnnnnnnnnnnnnnnnnnnnnnnnnnnnnnnnnnnnnnnnnnnnnnnnnnnnnnnnnnnnnnnnnnnnnnnnnnnnnnnnnnnnnnnnnnnnnnnnnnnnnnnnnnnnnnnnnnnnnnnnnnnnnnnnnnnnnnnnnnnnnnnnnnnnnnnnnnnnnnnnnnnnnnnnnnnnnnnnnnnnnnnnnnnnnnnnnnnnnnnnnnnnnnnnnnnnnnnnnnnnnnnnnnnnnnnnnnnnnnnnnnnnnnnnnnnnnnnnnnnnnnnnnnnnnnnnnnnnnnnnnnnnnnnnnnnnnnnnnnnnnnnnnnnnnnnnnnnnnnnnnnnnnnnnnnnnnnnnnnnnnnnnnnnnnnnnnnnnnnnnnnnnnnnnnnnnnnnnnnnnnnnnnnnnnnnnnnnnnnnnnnnnnnnnnnnnnnnnnnnnnnnnnnnnnnnnnnnnnnnnnnnnnnnnnnnnnnnnnnnnnnnnnnnnnnnnnnnnnnnnnnnnnnnnnnnnnnnnnnnnnnnnnnnnnnnnnnnnnnnnnnnnnnnnnnnnnnnnnnnnnnnnnnnnnnnnnnnnnnnnnnnnnnnnnnnnnnnnnnnnnnnnnnnnnnnnnnnnnnnnnnnnnnnnnnnnnnnnnnnnnnnnnnnnnnnnnnnnnnnnnnnnnnnnnnnnnnnnnnnnnnnnnnnnnnnnnnnnnnnnnnnnnnnnnnnnnnnnnnnnnnnnnnnnnnnnnnnnnnnnnnnnnnnnnnnnnnnnnnnnnnnnnnnnnnnnnnnnnnnnnnnnnnnnnnnnnnnnnnnnnnnnnnnnnnnnnnnnnnnnnnnnnnnnnnnnnnnnnnnnnnnnnnnnnnnnnnnnnnnnnnnnnnnnnnnnnnnnnnnnnnnnnnnnnnnnnnnnnnnnnnnnnnnnnnnnnnnnnnnnnnnnnnnnnnnnnnnnnnnnnnnnnnnnnnnnnnnnnnnnnnnnnnnnnnnnnnnnnnnnnnnnnnnnnnnnnnnnnnnnnnnnnnnnnnnnnnnnnnnnnnnnnnnnnnnnnnnnnnnnnnnnnnnnnnnnnnnnnnnnnnnnnnnnnnnnnnnnnnnnnnnnnnnnnnnnnnnnnnnnnnnnnnnnnnnnnnnnnnnnnnnnnnnnnnnnnnnnnnnnnnnnnnnnnnnnnnnnnnnnnnnnnnnnnnnnnnnnnnnnnnnnnnnnnnnnnnnnnnnnnnnnnnnnnnnnnnnnnnnnnnnnnnnnnnnnnnnnnnnnnnnnnnnnnnnnnnnnnnnnnnnnnnnnnnnnnnnnnnnnnnnnnnnnnnnnnnnnnnnnnnnnnnnnnnnnnnnnnnnnnnnnnnnnnnnnnnnnnnnnnnnnnnnnnnnnnnnnnnnnnnnnnnnnnnnnnnnnnnnnnnnnnnnnnnnnnnnnnnnnnnnnnnnnnnnnnnnnnnnnnnnnnnnnnnnnnnnnnnnnnnnnnnnnnnnnnnnnnnnnnnnnnnnnnnnnnnnnnnnnnnnnnnnnnnnnnnnnnnnnnnnnnnnnnnnnnnnnnnnnnnnnnnnnnnnnnnnnnnnnnnnnnnnnnnnnnnnnnnnnnnnnnnnnnnnnnnnnnnnnnnnnnnnnnnnnnnnnnnnnnnnnnnnnnnnnnnnnnnnnnnnnnnnnnnnnnnnnnnnnnnnnnnnnnnnnnnnnnnnnnnnnnnnnnnnnnnnnnnnnnnnnnnnnnnnnnnnnnnnnnnnnnnnnnnnnnnnnnnnnnnnnnnnnnnnnnnnnnnnnnnnnnnnnnnnnnnnnnnnnnnnnnnnnnnnnnnnnnnnnnnnnnnnnnnnnnnnnnnnnnnnnnnnnnnnnnnnnnnnnnnnnnnnnnnnnnnnnnnnnnnnnnnnnnnnnnnnnnnnnnnnnnnnnnnnnnnnnnnnnnnnnnnnnnnnnnnnnnnnnnnnnnnnnnnnnnnnnnnnnnnnnnnnnnnnnnnnnnnnnnnnnnnnnnnnnnnnnnnnnnnnnnnnnnnnnnnnnnnnnnnnnnnnnnnnnnnnnnnnnnnnnnnnnnnnnnnnnnnnnnnnnnnnnnnnnnnnnnnnnnnnnnnnnnnnnnnnnnnnnnnnnnnnnnnnnnnnnnnnnnnnnnnnnnnnnnnnnnnnnnnnnnnnnnnnnnnnnnnnnnnnnnnnnnnnnnnnnnnnnnnnnnnnnnnnnnnnnnnnnnnnnnnnnnnnnnnnnnnnnnnnnnnnnnnnnnnnnnnnnnnnnnnnnnnnnnnnnnnnnnnnnnnnnnnnnnnnnnnnnnnnnnnnnnnnnnnnnnnnnnnnnnnnnnnnnnnnnnnnnnnnnnnnnnnnnnnnnnnnnnnnnnnnnnnnnnnnnnnnnnnnnnnnnnnnnnnnnnnnnnnnnnnnnnnnnnnnnnnnnnnnnnnnnnnnnnnnnnnnnnnnnnnnnnnnnnnnnnnnnnnnnnnnnnnnnnnnnnnnnnnnnnnnnnnnnnnnnnnnnnnnnnnnnnnnnnnnnnnnnnnnnnnnnnnnnnnnnnnnnnnnnnnnnnnnnnnnnnnnnnnnnnnnnnnnnnnnnnnnnnnnnnnnnnnnnnnnnnnnnnnnnnnnnnnnnnnnnnnnnnnnnnnnnnnnnnnnnnnnnnnnnnnnnnnnnnnnnnnnnnnnnnnnnnnnnnnnnnnnnnnnnnnnnnnnnnnnnnnnnnnnnnnnnnnnnnnnnnnnnnnnnnnnnnnnnnnnnnnnnnnnnnnnnnnnnnnnnnnnnnnnnnnnnnnnnnnnnnnnnnnnnnnnnnnnnnnnnnnnnnnnnnnnnnnnnnnnnnnnnnnnnnnnnnnnnnnnnnnnnnnnnnnnnnnnnnnnnnnnnnnnnnnnnnnnnnnnnnnnnnnnnnnnnnnnnnnnnnnnnnnnnnnnnnnnnnnnnnnnnnnnnnnnnnnnnnnnnnnnnnnnnnnnnnnnnnnnnnnnnnnnnnnnnnnnnnnnnnnnnnnnnnnnnnnnnnnnnnnnnnnnnnnnnnnnnnnnnnnnnnnnnnnnnnnnnnnnnnnnnnnnnnnnnnnnnnnnnnnnnnnnnnnnnnnnnnnnnnnnnnnnnnnnnnnnnnnnnnnnnnnnnnnnnnnnnnnnnnnnnnnnnnnnnnnnnnnnnnnnnnnnnnnnnnnnnnnnnnnnnnnnnnnnnnnnnnnnnnnnnnnnnnnnnnnnnnnnnnnnnnnnnnnnnnnnnnnnnnnnnnnnnnnnnnnnnnnnnnnnnnnnnnnnnnnnnnnnnnnnnnnnnnnnnnnnnnnnnnnnnnnnnnnnnnnnnnnnnnnnnnnnnnnnnnnnnnnnnnnnnnnnnnnnnnnnnnnnnnnnnnnnnnnnnnnnnnnnnnnnnnnnnnnnnnnnnnnnnnnnnnnnnnnnnnnnnnnnnnnnnnnnnnnnnnnnnnnnnnnnnnnnnnnnnnnnnnnnnnnnnnnnnnnnnnnnnnnnnnnnnnnnnnnnnnnnnnnnnnnnnnnnnnnnnnnnnnnnnnnnnnnnnnnnnnnnnnnnnnnnnnnnnnnnnnnnnnnnnnnnnnnnnnnnnnnnnnnnnnnnnnnnnnnnnnnnnnnnnnnnnnnnnnnnnnnnnnnnnnnnnnnnnnnnnnnnnnnnnnnnnnnnnnnnnnnnnnnnnnnnnnnnnnnnnnnnnnnnnnnnnnnnnnnnnnnnnnnnnnnnnnnnnnnnnnnnnnnnnnnnnnnnnnnnnnnnnnnnnnnnnnnnnnnnnnnnnnnnnnnnnnnnnnnnnnnnnnnnnnnnnnnnnnnnnnnnnnnnnnnnnnnnnnnnnnnnnnnnnnnnnnnnnnnnnnnnnnnnnnnnnnnnnnnnnnnnnnnnnnnnnnnnnnnnnnnnnnnnnnnnnnnnnnnnnnnnnnnnnnnnnnnnnnnnnnnnnnnnnnnnnnnnnnnnnnnnnnnnnnnnnnnnnnnnnnnnnnnnnnnnnnnnnnnnnnnnnnnnnnnnnnnnnnnnnnnnnnnnnnnnnnnnnnnnnnnnnnnnnnnnnnnnnnnnnnnnnnnnnnnnnnnnnnnnnnnnnnnnnnnnnnnnnnnnnnnnnnnnnnnnnnnnnnnnnnnnnnnnnnnnnnnnnnnnnnnnnnnnnnnnnnnnnnnnnnnnnnnnnnnnnnnnnnnnnnnnnnnnnnnnnnnnnnnnnnnnnnnnnnnnnnnnnnnnnnnnnnnnnnnnnnnnnnnnnnnnnnnnnnnnnnnnnnnnnnnnnnnnnnnnnnnnnnnnnnnnnnnnnnnnnnnnnnnnnnnnnnnnnnnnnnnnnnnnnnnnnnnnnnnnnnnnnnnnnnnnnnnnnnnnnnnnnnnnnnnnnnnnnnnnnnnnnnnnnnnnnnnnnnnnnnnnnnnnnnnnnnnnnnnnnnnnnnnnnnnnnnnnnnnnnnnnnnnnnnnnnnnnnnnnnnnnnnnnnnnnnnnnnnnnnnnnnnnnnnnnnnnnnnnnnnnnnnnnnnnnnnnnnnnnnnnnnnnnnnnnnnnnnnnnnnnnnnnnnnnnnnnnnnnnnnnnnnnnnnnnnnnnnnnnnnnnnnnnnnnnnnnnnnnnnnnnnnnnnnnnnnnnnnnnnnnnnnnnnnnnnnnnnnnnnnnnnnnnnnnnnnnnnnnnnnnnnnnnnnnnnnnnnnnnnnnnnnnnnnnnnnnnnnnnnnnnnnnnnnnnnnnnnnnnnnnnnnnnnnnnnnnnnnnnnnnnnnnnnnnnnnnnnnnnnnnnnnnnnnnnnnnnnnnnnnnnnnnnnnnnnnnnnnnnnnnnnnnnnnnnnnnnnnnnnnnnnnnnnnnnnnnnnnnnnnnnnnnnnnnnnnnnnnnnnnnnnnnnnnnnnnnnnnnnnnnnnnnnnnnnnnnnnnnnnnnnnnnnnnnnnnnnnnnnnnnnnnnnnnnnnnnnnnnnnnnnnnnnnnnnnnnnnnnnnnnnnnnnnnnnnnnnnnnnnnnnnnnnnnnnnnnnnnnnnnnnnnnnnnnnnnnnnnnnnnnnnnnnnnnnnnnnnnnnnnnnnnnnnnnnnnnnnnnnnnnnnnnnnnnnnnnnnnnnnnnnnnnnnnnnnnnnnnnnnnnnnnnnnnnnnnnnnnnnnnnnnnnnnnnnnnnnnnnnnnnnnnnnnnnnnnnnnnnnnnnnnnnnnnnnnnnnnnnnnnnnnnnnnnnnnnnnnnnnnnnnnnnnnnnnnnnnnnnnnnnnnnnnnnnnnnnnnnnnnnnnnnnnnnnnnnnnnnnnnnnnnnnnnnnnnnnnnnnnnnnnnnnnnnnnnnnnnnnnnnnnnnnnnnnnnnnnnnnnnnnnnnnnnnnnnnnnnnnnnnnnnnnnnnnnnnnnnnnnnnnnnnnnnnnnnnnnnnnnnnnnnnnnnnnnnnnnnnnnnnnnnnnnnnnnnnnnnnnnnnnnnnnnnnnnnnnnnnnnnnnnnnnnnnnnnnnnnnnnnnnnnnnnnnnnnnnnnnnnnnnnnnnnnnnnnnnnnnnnnnnnnnnnnnnnnnnnnnnnnnnnnnnnnnnnnnnnnnnnnnnnnnnnnnnnnnnnnnnnnnnnnnnnnnnnnnnnnnnnnnnnnnnnnnnnnnnnnnnnnnnnnnnnnnnnnnnnnnnnnnnnnnnnnnnnnnnnnnnnnnnnnnnnnnnnnnnnnnnnnnnnnnnnnnnnnnnnnnnnnnnnnnnnnnnnnnnnnnnnnnnnnnnnnnnnnnnnnnnnnnnnnnnnnnnnnnnnnnnnnnnnnnnnnnnnnnnnnnnnnnnnnnnnnnnnnnnnnnnnnnnnnnnnnnnnnnnnnnnnnnnnnnnnnnnnnnnnnnnnnnnnnnnnnnnnnnnnnnnnnnnnnnnnnnnnnnnnnnnnnnnnnnnnnnnnnnnnnnnnnnnnnnnnnnnnnnnnnnnnnnnnnnnnnnnnnnnnnnnnnnnnnnnnnnnnnnnnnnnnnnnnnnnnnnnnnnnnnnnnnnnnnnnnnnnnnnnnnnnnnnnnnnnnnnnnnnnnnnnnnnnnnnnnnnnnnnnnnnnnnnnnnnnnnnnnnnnnnnnnnnnnnnnnnnnnnnnnnnnnnnnnnnnnnnnnnnnnnnnnnnnnnnnnnnnnnnnnnnnnnnnnnnnnnnnnnnnnnnnnnnnnnnnnnnnnnnnnnnnnnnnnnnnnnnnnnnnnnnnnnnnnnnnnnnnnnnnnnnnnnnnnnnnnnnnnnnnnnnnnnnnnnnnnnnnnnnnnnnnnnnnnnnnnnnnnnnnnnnnnnnnnnnnnnnnnnnnnnnnnnnnnnnnnnnnnnnnnnnnnnnnnnnnnnnnnnnnnnnnnnnnnnnnnnnnnnnnnnnnnnnnnnnnnnnnnnnnnnnnnnnnnnnnnnnnnnnnnnnnnnnnnnnnnnnnnnnnnnnnnnnnnnnnnnnnnnnnnnnnnnnnnnnnnnnnnnnnnnnnnnnnnnnnnnnnnnnnnnnnnnnnnnnnnnnnnnnnnnnnnnnnnnnnnnnnnnnnnnnnnnnnnnnnnnnnnnnnnnnnnnnnnnnnnnnnnnnnnnnnnnnnnnnnnnnnnnnnnnnnnnnnnnnnnnnnnnnnnnnnnnnnnnnnnnnnnnnnnnnnnnnnnnnnnnnnnnnnnnnnnnnnnnnnnnnnnnnnnnnnnnnnnnnnnnnnnnnnnnnnnnnnnnnnnnnnnnnnnnnnnnnnnnnnnnnnnnnnnnnnnnnnnnnnnnnnnnnnnnnnnnnnnnnnnnnnnnnnnnnnnnnnnnnnnnnnnnnnnnnnnnnnnnnnnnnnnnnnnnnnnnnnnnnnnnnnnnnnnnnnnnnnnnnnnnnnnnnnnnnnnnnnnnnnnnnnnnnnnnnnnnnnnnnnnnnnnnnnnnnnnnnnnnnnnnnnnnnnnnnnnnnnnnnnnnnnnnnnnnnnnnnnnnnnnnnnnnnnnnnnnnnnnnnnnnnnnnnnnnnnnnnnnnnnnnnnnnnnnnnnnnnnnnnnnnnnnnnnnnnnnnnnnnnnnnnnnnnnnnnnnnnnnnnnnnnnnnnnnnnnnnnnnnnnnnnnnnnnnnnnnnnnnnnnnnnnnnnnnnnnnnnnnnnnnnnnnnnnnnnnnnnnnnnnnnnnnnnnnnnnnnnnnnnnnnnnnnnnnnnnnnnnnnnnnnnnnnnnnnnnnnnnnnnnnnnnnnnnnnnnnnnnnnnnnnnnnnnnnnnnnnnnnnnnnnnnnnnnnnnnnnnnnnnnnnnnnnnnnnnnnnnnnnnnnnnnnnnnnnnnnnnnnnnnnnnnnnnnnnnnnnnnnnnnnnnnnnnnnnnnnnnnnnnnnnnnnnnnnnnnnnnnnnnnnnnnnnnnnnnnnnnnnnnnnnnnnnnnnnnnnnnnnnnnnnnnnnnnnnnnnnnnnnnnnnnnnnnnnnnnnnnnnnnnnnnnnnnnnnnnnnnnnnnnnnnnnnnnnnnnnnnnnnnnnnnnnnnnnnnnnnnnnnnnnnnnnnnnnnnnnnnnnnnnnnnnnnnnnnnnnnnnnnnnnnnnnnnnnnnnnnnnnnnnnnnnnnnnnnnnnnnnnnnnnnnnnnnnnnnnnnnnnnnnnnnnnnnnnnnnnnnnnnnnnnnnnnnnnnnnnnnnnnnnnnnnnnnnnnnnnnnnnnnnnnnnnnnnnnnnnnnnnnnnnnnnnnnnnnnnnnnnnnnnnnnnnnnnnnnnnnnnnnnnnnnnnnnnnnnnnnnnnnnnnnnnnnnnnnnnnnnnnnnnnnnnnnnnnnnnnnnnnnnnnnnnnnnnnnnnnnnnnnnnnnnnnnnnnnnnnnnnnnnnnnnnnnnnnnnnnnnnnnnnnnnnnnnnnnnnnnnnnnnnnnnnnnnnnnnnnnnnnnnnnnnnnnnnnnnnnnnnnnnnnnnnnnnnnnnnnnnnnnnnnnnnnnnnnnnnnnnnnnnnnnnnnnnnnnnnnnnnnnnnnnnnnnnnnnnnnnnnnnnnnnnnnnnnnnnnnnnnnnnnnnnnnnnnnnnnnnnnnnnnnnnnnnnnnnnnnnnnnnnnnnnnnnnnnnnnnnnnnnnnnnnnnnnnnnnnnnnnnnnnnnnnnnnnnnnnnnnnnnnnnnnnnnnnnnnnnnnnnnnnnnnnnnnnnnnnnnnnnnnnnnnnnnnnnnnnnnnnnnnnnnnnnnnnnnnnnnnnnnnnnnnnnnnnnnnnnnnnnnnnnnnnnnnnnnnnnnnnnnnnnnnnnnnnnnnnnnnnnnnnnnnnnnnnnnnnnnnnnnnnnnnnnnnnnnnnnnnnnnnnnnnnnnnnnnnnnnnnnnnnnnnnnnnnnnnnnnnnnnnnnnnnnnnnnnnnnnnnnnnnnnnnnnnnnnnnnnnnnnnnnnnnnnnnnnnnnnnnnnnnnnnnnnnnnnnnnnnnnnnnnnnnnnnnnnnnnnnnnnnnnnnnnnnnnnnnnnnnnnnnnnnnnnnnnnnnnnnnnnnnnnnnnnnnnnnnnnnnnnnnnnnnnnnnnnnnnnnnnnnnnnnnnnnnnnnnnnnnnnnnnnnnnnnnnnnnnnnnnnnnnnnnnnnnnnnnnnnnnnnnnnnnnnnnnnnnnnnnnnnnnnnnnnnnnnnnnnnnnnnnnnnnnnnnnnnnnnnnnnnnnnnnnnnnnnnnnnnnnnnnnnnnnnnnnnnnnnnnnnnnnnnnnnnnnnnnnnnnnnnnnnnnnnnnnnnnnnnnnnnnnnnnnnnnnnnnnnnnnnnnnnnnnnnnnnnnnnnnnnnnnnnnnnnnnnnnnnnnnnnnnnnnnnnnnnnnnnnnnnnnnnnnnnnnnnnnnnnnnnnnnnnnnnnnnnnnnnnnnnnnnnnnnnnnnnnnnnnnnnnnnnnnnnnnnnnnnnnnnnnnnnnnnnnnnnnnnnnnnnnnnnnnnnnnnnnnnnnnnnnnnnnnnnnnnnnnnnnnnnnnnnnnnnnnnnnnnnnnnnnnnnnnnnnnnnnnnnnnnnnnnnnnnnnnnnnnnnnnnnnnnnnnnnnnnnnnnnnnnnnnnnnnnnnnnnnnnnnnnnnnnnnnnnnnnnnnnnnnnnnnnnnnnnnnnnnnnnnnnnnnnnnnnnnnnnnnnnnnnnnnnnnnnnnnnnnnnnnnnnnnnnnnnnnnnnnnnnnnnnnnnnnnnnnnnnnnnnnnnnnnnnnnnnnnnnnnnnnnnnnnnnnnnnnnnnnnnnnnnnnnnnnnnnnnnnnnnnnnnnnnnnnnnnnnnnnnnnnnnnnnnnnnnnnnnnnnnnnnnnnnnnnnnnnnnnnnnnnnnnnnnnnnnnnnnnnnnnnnnnnnnnnnnnnnnnnnnnnnnnnnnnnnnnnnnnnnnnnnnnnnnnnnnnnnnnnnnnnnnnnnnnnnnnnnnnnnnnnnnnnnnnnnnnnnnnnnnnnnnnnnnnnnnnnnnnnnnnnnnnnnnnnnnnnnnnnnnnnnnnnnnnnnnnnnnnnnnnnnnnnnnnnnnnnnnnnnnnnnnnnnnnnnnnnnnnnnnnnnnnnnnnnnnnnnnnnnnnnnnnnnnnnnnnnnnnnnnnnnnnnnnnnnnnnnnnnnnnnnnnnnnnnnnnnnnnnnnnnnnnnnnnnnnnnnnnnnnnnnnnnnnnnnnnnnnnnnnnnnnnnnnnnnnnnnnnnnnnnnnnnnnnnnnnnnnnnnnnnnnnnnnnnnnnnnnnnnnnnnnnnnnnnnnnnnnnnnnnnnnnnnnnnnnnnnnnnnnnnnnnnnnnnnnnnnnnnnnnnnnnnnnnnnnnnnnnnnnnnnnnnnnnnnnnnnnnnnnnnnnnnnnnnnnnnnnnnnnnnnnnnnnnnnnnnnnnnnnnnnnnnnnnnnnnnnnnnnnnnnnnnnnnnnnnnnnnnnnnnnnnnnnnnnnnnnnnnnnnnnnnnnnnnnnnnnnnnnnnnnnnnnnnnnnnnnnnnnnnnnnnnnnnnnnnnnnnnnnnnnnnnnnnnnnnnnnnnnnnnnnnnnnnnnnnnnnnnnnnnnnnnnnnnnnnnnnnnnnnnnnnnnnnnnnnnnnnnnnnnnnnnnnnnnnnnnnnnnnnnnnnnnnnnnnnnnnnnnnnnnnnnnnnnnnnnnnnnnnnnnnnnnnnnnnnnnnnnnnnnnnnnnnnnnnnnnnnnnnnnnnnnnnnnnnnnnnnnnnnnnnnnnnnnnnnnnnnnnnnnnnnnnnnnnnnnnnnnnnnnnnnnnnnnnnnnnnnnnnnnnnnnnnnnnnnnnnnnnnnnnnnnnnnnnnnnnnnnnnnnnnnnnnnnnnnnnnnnnnnnnnnnnnnnnnnnnnnnnnnnnnnnnnnnnnnnnnnnnnnnnnnnnnnnnnnnnnnnnnnnnnnnnnnnnnnnnnnnnnnnnnnnnnnnnnnnnnnnnnnnnnnnnnnnnnnnnnnnnnnnnnnnnnnnnnnnnnnnnnnnnnnnnnnnnnnnnnnnnnnnnnnnnnnnnnnnnnnnnnnnnnnnnnnnnnnnnnnnnnnnnnnnnnnnnnnnnnnnnnnnnnnnnnnnnnnnnnnnnnnnnnnnnnnnnnnnnnnnnnnnnnnnnnnnnnnnnnnnnnnnnnnnnnnnnnnnnnnnnnnnnnnnnnnnnnnnnnnnnnnnnnnnnnnnnnnnnnnnnnnnnnnnnnnnnnnnnnnnnnnnnnnnnnnnnnnnnnnnnnnnnnnnnnnnnnnnnnnnnnnnnnnnnnnnnnnnnnnnnnnnnnnnnnnnnnnnnnnnnnnnnnnnnnnnnnnnnnnnnnnnnnnnnnnnnnnnnnnnnnnnnnnnnnnnnnnnnnnnnnnnnnnnnnnnnnnnnnnnnnnnnnnnnnnnnnnnnnnnnnnnnnnnnnnnnnnnnnnnnnnnnnnnnnnnnnnnnnnnnnnnnnnnnnnnnnnnnnnnnnnnnnnnnnnnnnnnnnnnnnnnnnnnnnnnnnnnnnnnnnnnnnnnnnnnnnnnnnnnnnnnnnnnnnnnnnnnnnnnnnnnnnnnnnnnnnnnnnnnnnnnnnnnnnnnnnnnnnnnnnnnnnnnnnnnnnnnnnnnnnnnnnnnnnnnnnnnnnnnnnnnnnnnnnnnnnnnnnnnnnnnnnnnnnnnnnnnnnnnnnnnnnnnnnnnnnnnnnnnnnnnnnnnnnnnnnnnnnnnnnnnnnnnnnnnnnnnnnnnnnnnnnnnnnnnnnnnnnnnnnnnnnnnnnnnnnnnnnnnnnnnnnnnnnnnnnnnnnnnnnnnnnnnnnnnnnnnnnnnnnnnnnnnnnnnnnnnnnnnnnnnnnnnnnnnnnnnnnnnnnnnnnnnnnnnnnnnnnnnnnnnnnnnnnnnnnnnnnnnnnnnnnnnnnnnnnnnnnnnnnnnnnnnnnnnnnnnnnnnnnnnnnnnnnnnnnnnnnnnnnnnnnnnnnnnnnnnnnnnnnnnnnnnnnnnnnnnnnnnnnnnnnnnnnnnnnnnnnnnnnnnnnnnnnnnnnnnnnnnnnnnnnnnnnnnnnnnnnnnnnnnnnnnnnnnnnnnnnnnnnnnnnnnnnnnnnnnnnnnnnnnnnnnnnnnnnnnnnnnnnnnnnnnnnnnnnnnnnnnnnnnnnnnnnnnnnnnnnnnnnnnnnnnnnnnnnnnnnnnnnnnnnnnnnnnnnnnnnnnnnnnnnnnnnnnnnnnnnnnnnnnnnnnnnnnnnnnnnnnnnnnnnnnnnnnnnnnnnnnnnnnnnnnnnnnnnnnnnnnnnnnnnnnnnnnnnnnnnnnnnnnnnnnnnnnnnnnnnnnnnnnnnnnnnnnnnnnnnnnnnnnnnnnnnnnnnnnnnnnnnnnnnnnnnnnnnnnnnnnnnnnnnnnnnnnnnnnnnnnnnnnnnnnnnnnnnnnnnnnnnnnnnnnnnnnnnnnnnnnnnnnnnnnnnnnnnnnnnnnnnnnnnnnnnnnnnnnnnnnnnnnnnnnnnnnnnnnnnnnnnnnnnnnnnnnnnnnnnnnnnnnnnnnnnnnnnnnnnnnnnnnnnnnnnnnnnnnnnnnnnnnnnnnnnnnnnnnnnnnnnnnnnnnnnnnnnnnnnnnnnnnnnnnnnnnnnnnnnnnnnnnnnnnnnnnnnnnnnnnnnnnnnnnnnnnnnnnnnnnnnnnnnnnnnnnnnnnnnnnnnnnnnnnnnnnnnnnnnnnnnnnnnnnnnnnnnnnnnnnnnnnnnnnnnnnnnnnnnnnnnnnnnnnnnnnnnnnnnnnnnnnnnnnnnnnnnnnnnnnnnnnnnnnnnnnnnnnnnnnnnnnnnnnnnnnnnnnnnnnnnnnnnnnnnnnnnnnnnnnnnnnnnnnnnnnnnnnnnnnnnnnnnnnnnnnnnnnnnnnnnnnnnnnnnnnnnnnnnnnnnnnnnnnnnnnnnnnnnnnnnnnnnnnnnnnnnnnnnnnnnnnnnnnnnnnnnnnnnnnnnnnnnnnnnnnnnnnnnnnnnnnnnnnnnnnnnnnnnnnnnnnnnnnnnnnnnnnnnnnnnnnnnnnnnnnnnnnnnnnnnnnnnnnnnnnnnnnnnnnnnnnnnnnnnnnnnnnnnnnnnnnnnnnnnnnnnnnnnnnnnnnnnnnnnnnnnnnnnnnnnnnnnnnnnnnnnnnnnnnnnnnnnnnnnnnnnnnnnnnnnnnnnnnnnnnnnnnnnnnnnnnnnnnnnnnnnnnnnnnnnnnnnnnnnnnnnnnnnnnnnnnnnnnnnnnnnnnnnnnnnnnnnnnnnnnnnnnnnnnnnnnnnnnnnnnnnnnnnnnnnnnnnnnnnnnnnnnnnnnnnnnnnnnnnnnnnnnnnnnnnnnnnnnnnnnnnnnnnnnnnnnnnnnnnnnnnnnnnnnnnnnnnnnnnnnnnnnnnnnnnnnnnnnnnnnnnnnnnnnnnnnnnnnnnnnnnnnnnnnnnnnnnnnnnnnnnnnnnnnnnnnnnnnnnnnnnnnnnnnnnnnnnnnnnnnnnnnnnnnnnnnnnnnnnnnnnnnnnnnnnnnnnnnnnnnnnnnnnnnnnnnnnnnnnnnnnnnnnnnnnnnnnnnnnnnnnnnnnnnnnnnnnnnnnnnnnnnnnnnnnnnnnnnnnnnnnnnnnnnnnnnnnnnnnnnnnnnnnnnnnnnnnnnnnnnnnnnnnnnnnnnnnnnnnnnnnnnnnnnnnnnnnnnnnnnnnnnnnnnnnnnnnnnnnnnnnnnnnnnnnnnnnnnnnnnnnnnnnnnnnnnnnnnnnnnnnnnnnnnnnnnnnnnnnnnnnnnnnnnnnnnnnnnnnnnnnnnnnnnnnnnnnnnnnnnnnnnnnnnnnnnnnnnnnnnnnnnnnnnnnnnnnnnnnnnnnnnnnnnnnnnnnnnnnnnnnnnnnnnnnnnnnnnnnnnnnnnnnnnnnnnnnnnnnnnnnnnnnnnnnnnnnnnnnnnnnnnnnnnnnnnnnnnnnnnnnnnnnnnnnnnnnnnnnnnnnnnnnnnnnnnnnnnnnnnnnnnnnnnnnnnnnnnnnnnnnnnnnnnnnnnnnnnnnnnnnnnnnnnnnnnnnnnnnnnnnnnnnnnnnnnnnnnnnnnnnnnnnnnnnnnnnnnnnnnnnnnnnnnnnnnnnnnnnnnnnnnnnnnnnnnnnnnnnnnnnnnnnnnnnnnnnnnnnnnnnnnnnnnnnnnnnnnnnnnnnnnnnnnnnnnnnnnnnnnnnnnnnnnnnnnnnnnnnnnnnnnnnnnnnnnnnnnnnnnnnnnnnnnnnnnnnnnnnnnnnnnnnnnnnnnnnnnnnnnnnnnnnnnnnnnnnnnnnnnnnnnnnnnnnnnnnnnnnnnnnnnnnnnnnnnnnnnnnnnnnnnnnnnnnnnnnnnnnnnnnnnnnnnnnnnnnnnnnnnnnnnnnnnnnnnnnnnnnnnnnnnnnnnnnnnnnnnnnnnnnnnnnnnnnnnnnnnnnnnnnnnnnnnnnnnnnnnnnnnnnnnnnnnnnnnnnnnnnnnnnnnnnnnnnnnnnnnnnnnnnnnnnnnnnnnnnnnnnnnnnnnnnnnnnnnnnnnnnnnnnnnnnnnnnnnnnnnnnnnnnnnnnnnnnnnnnnnnnnnnnnnnnnnnnnnnnnnnnnnnnnnnnnnnnnnnnnnnnnnnnnnnnnnnnnnnnnnnnnnnnnnnnnnnnnnnnnnnnnnnnnnnnnnnnnnnnnnnnnnnnnnnnnnnnnnnnnnnnnnnnnnnnnnnnnnnnnnnnnnnnnnnnnnnnnnnnnnnnnnnnnnnnnnnnnnnnnnnnnnnnnnnnnnnnnnnnnnnnnnnnnnnnnnnnnnnnnnnnnnnnnnnnnnnnnnnnnnnnnnnnnnnnnnnnnnnnnnnnnnnnnnnnnnnnnnnnnnnnnnnnnnnnnnnnnnnnnnnnnnnnnnnnnnnnnnnnnnnnnnnnnnnnnnnnnnnnnnnnnnnnnnnnnnnnnnnnnnnnnnnnnnnnnnnnnnnnnnnnnnnnnnnnnnnnnnnnnnnnnnnnnnnnnnnnnnnnnnnnnnnnnnnnnnnnnnnnnnnnnnnnnnnnnnnnnnnnnnnnnnnnnnnnnnnnnnnnnnnnnnnnnnnnnnnnnnnnnnnnnnnnnnnnnnnnnnnnnnnnnnnnnnnnnnnnnnnnnnnnnnnnnnnnnnnnnnnnnnnnnnnnnnnnnnnnnnnnnnnnnnnnnnnnnnnnnnnnnnnnnnnnnnnnnnnnnnnnnnnnnnnnnnnnnnnnnnnnnnnnnnnnnnnnnnnnnnnnnnnnnnnnnnnnnnnnnnnnnnnnnnnnnnnnnnnnnnnnnnnnnnnnnnnnnnnnnnnnnnnnnnnnnnnnnnnnnnnnnnnnnnnnnnnnnnnnnnnnnnnnnnnnnnnnnnnnnnnnnnnnnnnnnnnnnnnnnnnnnnnnnnnnnnnnnnnnnnnnnnnnnnnnnnnnnnnnnnnnnnnnnnnnnnnnnnnnnnnnnnnnnnnnnnnnnnnnnnnnnnnnnnnnnnnnnnnnnnnnnnnnnnnnnnnnnnnnnnnnnnnnnnnnnnnnnnnnnnnnnnnnnnnnnnnnnnnnnnnnnnnnnnnnnnnnnnnnnnnnnnnnnnnnnnnnnnnnnnnnnnnnnnnnnnnnnnnnnnnnnnnnnnnnnnnnnnnnnnnnnnnnnnnnnnnnnnnnnnnnnnnnnnnnnnnnnnnnnnnnnnnnnnnnnnnnnnnnnnnnnnnnnnnnnnnnnnnnnnnnnnnnnnnnnnnnnnnnnnnnnnnnnnnnnnnnnnnnnnnnnnnnnnnnnnnnnnnnnnnnnnnnnnnnnnnnnnnnnnnnnnnnnnnnnnnnnnnnnnnnnnnnnnnnnnnnnnnnnnnnnnnnnnnnnnnnnnnnnnnnnnnnnnnnnnnnnnnnnnnnnnnnnnnnnnnnnnnnnnnnnnnnnnnnnnnnnnnnnnnnnnnnnnnnnnnnnnnnnnnnnnnnnnnnnnnnnnnnnnnnnnnnnnnnnnnnnnnnnnnnnnnnnnnnnnnnnnnnnnnnnnnnnnnnnnnnnnnnnnnnnnnnnnnnnnnnnnnnnnnnnnnnnnnnnnnnnnnnnnnnnnnnnnnnnnnnnnnnnnnnnnnnnnnnnnnnnnnnnnnnnnnnnnnnnnnnnnnnnnnnnnnnnnnnnnnnnnnnnnnnnnnnnnnnnnnnnnnnnnnnnnnnnnnnnnnnnnnnnnnnnnnnnnnnnnnnnnnnnnnnnnnnnnnnnnnnnnnnnnnnnnnnnnnnnnnnnnnnnnnnnnnnnnnnnnnnnnnnnnnnnnnnnnnnnnnnnnnnnnnnnnnnnnnnnnnnnnnnnnnnnnnnnnnnnnnnnnnnnnnnnnnnnnnnnnnnnnnnnnnnnnnnnnnnnnnnnnnnnnnnnnnnnnnnnnnnnnnnnnnnnnnnnnnnnnnnnnnnnnnnnnnnnnnnnnnnnnnnnnnnnnnnnnnnnnnnnnnnnnnnnnnnnnnnnnnnnnnnnnnnnnnnnnnnnnnnnnnnnnnnnnnnnnnnnnnnnnnnnnnnnnnnnnnnnnnnnnnnnnnnnnnnnnnnnnnnnnnnnnnnnnnnnnnnnnnnnnnnnnnnnnnnnnnnnnnnnnnnnnnnnnnnnnnnnnnnnnnnnnnnnnnnnnnnnnnnnnnnnnnnnnnnnnnnnnnnnnnnnnnnnnnnnnnnnnnnnnnnnnnnnnnnnnnnnnnnnnnnnnnnnnnnnnnnnnnnnnnnnnnnnnnnnnnnnnnnnnnnnnnnnnnnnnnnnnnnnnnnnnnnnnnnnnnnnnnnnnnnnnnnnnnnnnnnnnnnnnnnnnnnnnnnnnnnnnnnnnnnnnnnnnnnnnnnnnnnnnnnnnnnnnnnnnnnnnnnnnnnnnnnnnnnnnnnnnnnnnnnnnnnnnnnnnnnnnnnnnnnnnnnnnnnnnnnnnnnnnnnnnnnnnnnnnnnnnnnnnnnnnnnnnnnnnnnnnnnnnnnnnnnnnnnnnnnnnnnnnnnnnnnnnnnnnnnnnnnnnnnnnnnnnnnnnnnnnnnnnnnnnnnnnnnnnnnnnnnnnnnnnnnnnnnnnnnnnnnnnnnnnnnnnnnnnnnnnnnnnnnnnnnnnnnnnnnnnnnnnnnnnnnnnnnnnnnnnnnnnnnnnnnnnnnnnnnnnnnnnnnnnnnnnnnnnnnnnnnnnnnnnnnnnnnnnnnnnnnnnnnnnnnnnnnnnnnnnnnnnnnnnnnnnnnnnnnnnnnnnnnnnnnnnnnnnnnnnnnnnnnnnnnnnnnnnnnnnnnnnnnnnnnnnnnnnnnnnnnnnnnnnnnnnnnnnnnnnnnnnnnnnnnnnnnnnnnnnnnnnnnnnnnnnnnnnnnnnnnnnnnnnnnnnnnnnnnnnnnnnnnnnnnnnnnnnnnnnnnnnnnnnnnnnnnnnnnnnnnnnnnnnnnnnnnnnnnnnnnnnnnnnnnnnnnnnnnnnnnnnnnnnnnnnnnnnnnnnnnnnnnnnnnnnnnnnnnnnnnnnnnnnnnnnnnnnnnnnnnnnnnnnnnnnnnnnnnnnnnnnnnnnnnnnnnnnnnnnnnnnnnnnnnnnnnnnnnnnnnnnnnnnnnnnnnnnnnnnnnnnnnnnnnnnnnnnnnnnnnnnnnnnnnnnnnnnnnnnnnnnnnnnnnnnnnnnnnnnnnnnnnnnnnnnnnnnnnnnnnnnnnnnnnnnnnnnnnnnnnnnnnnnnnnnnnnnnnnnnnnnnnnnnnnnnnnnnnnnnnnnnnnnnnnnnnnnnnnnnnnnnnnnnnnnnnnnnnnnnnnnnnnnnnnnnnnnnnnnnnnnnnnnnnnnnnnnnnnnnnnnnnnnnnnnnnnnnnnnnnnnnnnnnnnnnnnnnnnnnnnnnnnnnnnnnnnnnnnnnnnnnnnnnnnnnnnnnnnnnnnnnnnnnnnnnnnnnnnnnnnnnnnnnnnnnnnnnnnnnnnnnnnnnnnnnnnnnnnnnnnnnnnnnnnnnnnnnnnnnnnnnnnnnnnnnnnnnnnnnnnnnnnnnnnnnnnnnnnnnnnnnnnnnnnnnnnnnnnnnnnnnnnnnnnnnnnnnnnnnnnnnnnnnnnnnnnnnnnnnnnnnnnnnnnnnnnnnnnnnnnnnnnnnnnnnnnnnnnnnnnnnnnnnnnnnnnnnnnnnnnnnnnnnnnnnnnnnnnnnnnnnnnnnnnnnnnnnnnnnnnnnnnnnnnnnnnnnnnnnnnnnnnnnnnnnnnnnnnnnnnnnnnnnnnnnnnnnnnnnnnnnnnnnnnnnnnnnnnnnnnnnnnnnnnnnnnnnnnnnnnnnnnnnnnnnnnnnnnnnnnnnnnnnnnnnnnnnnnnnnnnnnnnnnnnnnnnnnnnnnnnnnnnnnnnnnnnnnnnnnnnnnnnnnnnnnnnnnnnnnnnnnnnnnnnnnnnnnnnnnnnnnnnnnnnnnnnnnnnnnnnnnnnnnnnnnnnnnnnnnnnnnnnnnnnnnnnnnnnnnnnnnnnnnnnnnnnnnnnnnnnnnnnnnnnnnnnnnnnnnnnnnnnnnnnnnnnnnnnnnnnnnnnnnnnnnnnnnnnnnnnnnnnnnnnnnnnnnnnnnnnnnnnnnnnnnnnnnnnnnnnnnnnnnnnnnnnnnnnnnnnnnnnnnnnnnnnnnnnnnnnnnnnnnnnnnnnnnnnnnnnnnnnnnnnnnnnnnnnnnnnnnnnnnnnnnnnnnnnnnnnnnnnnnnnnnnnnnnnnnnnnnnnnnnnnnnnnnnnnnnnnnnnnnnnnnnnnnnnnnnnnnnnnnnnnnnnnnnnnnnnnnnnnnnnnnnnnnnnnnnnnnnnnnnnnnnnnnnnnnnnnnnnnnnnnnnnnnnnnnnnnnnnnnnnnnnnnnnnnnnnnnnnnnnnnnnnnnnnnnnnnnnnnnnnnnnnnnnnnnnnnnnnnnnnnnnnnnnnnnnnnnnnnnnnnnnnnnnnnnnnnnnnnnnnnnnnnnnnnnnnnnnnnnnnnnnnnnnnnnnnnnnnnnnnnnnnnnnnnnnnnnnnnnnnnnnnnnnnnnnnnnnnnnnnnnnnnnnnnnnnnnnnnnnnnnnnnnnnnnnnnnnnnnnnnnnnnnnnnnnnnnnnnnnnnnnnnnnnnnnnnnnnnnnnnnnnnnnnnnnnnnnnnnnnnnnnnnnnnnnnnnnnnnnnnnnnnnnnnnnnnnnnnnnnnnnnnnnnnnnnnnnnnnnnnnnnnnnnnnnnnnnnnnnnnnnnnnnnnnnnnnnnnnnnnnnnnnnnnnnnnnnnnnnnnnnnnnnnnnnnnnnnnnnnnnnnnnnnnnnnnnnnnnnnnnnnnnnnnnnnnnnnnnnnnnnnnnnnnnnnnnnnnnnnnnnnnnnnnnnnnnnnnnnnnnnnnnnnnnnnnnnnnnnnnnnnnnnnnnnnnnnnnnnnnnnnnnnnnnnnnnnnnnnnnnnnnnnnnnnnnnnnnnnnnnnnnnnnnnnnnnnnnnnnnnnnnnnnnnnnnnnnnnnnnnnnnnnnnnnnnnnnnnnnnnnnnnnnnnnnnnnnnnnnnnnnnnnnnnnnnnnnnnnnnnnnnnnnnnnnnnnnnnnnnnnnnnnnnnnnnnnnnnnnnnnnnnnnnnnnnnnnnnnnnnnnnnnnnnnnnnnnnnnnnnnnnnnnnnnnnnnnnnnnnnnnnnnnnnnnnnnnnnnnnnnnnnnnnnnnnnnnnnnnnnnnnnnnnnnnnnnnnnnnnnnnnnnnnnnnnnnnnnnnnnnnnnnnnnnnnnnnnnnnnnnnnnnnnnnnnnnnnnnnnnnnnnnnnnnnnnnnnnnnnnnnnnnnnnnnnnnnnnnnnnnnnnnnnnnnnnnnnnnnnnnnnnnnnnnnnnnnnnnnnnnnnnnnnnnnnnnnnnnnnnnnnnnnnnnnnnnnnnnnnnnnnnnnnnnnnnnnnnnnnnnnnnnnnnnnnnnnnnnnnnnnnnnnnnnnnnnnnnnnnnnnnnnnnnnnnnnnnnnnnnnnnnnnnnnnnnnnnnnnnnnnnnnnnnnnnnnnnnnnnnnnnnnnnnnnnnnnnnnnnnnnnnnnnnnnnnnnnnnnnnnnnnnnnnnnnnnnnnnnnnnnnnnnnnnnnnnnnnnnnnnnnnnnnnnnnnnnnnnnnnnnnnnnnnnnnnnnnnnnnnnnnnnnnnnnnnnnnnnnnnnnnnnnnnnnnnnnnnnnnnnnnnnnnnnnnnnnnnnnnnnnnnnnnnnnnnnnnnnnnnnnnnnnnnnnnnnnnnnnnnnnnnnnnnnnnnnnnnnnnnnnnnnnnnnnnnnnnnnnnnnnnnnnnnnnnnnnnnnnnnnnnnnnnnnnnnnnnnnnnnnnnnnnnnnnnnnnnnnnnnnnnnnnnnnnnnnnnnnnnnnnnnnnnnnnnnnnnnnnnnnnnnnnnnnnnnnnnnnnnnnnnnnnnnnnnnnnnnnnnnnnnnnnnnnnnnnnnnnnnnnnnnnnnnnnnnnnnnnnnnnnnnnnnnnnnnnnnnnnnnnnnnnnnnnnnnnnnnnnnnnnnnnnnnnnnnnnnnnnnnnnnnnnnnnnnnnnnnnnnnnnnnnnnnnnnnnnnnnnnnnnnnnnnnnnnnnnnnnnnnnnnnnnnnnnnnnnnnnnnnnnnnnnnnnnnnnnnnnnnnnnnnnnnnnnnnnnnnnnnnnnnnnnnnnnnnnnnnnnnnnnnnnnnnnnnnnnnnnnnnnnnnnnnnnnnnnnnnnnnnnnnnnnnnnnnnnnnnnnnnnnnnnnnnnnnnnnnnnnnnnnnnnnnnnnnnnnnnnnnnnnnnnnnnnnnnnnnnnnnnnnnnnnnnnnnnnnnnnnnnnnnnnnnnnnnnnnnnnnnnnnnnnnnnnnnnnnnnnnnnnnnnnnnnnnnnnnnnnnnnnnnnnnnnnnnnnnnnnnnnnnnnnnnnnnnnnnnnnnnnnnnnnnnnnnnnnnnnnnnnnnnnnnnnnnnnnnnnnnnnnnnnnnnnnnnnnnnnnnnnnnnnnnnnnnnnnnnnnnnnnnnnnnnnnnnnnnnnnnnnnnnnnnnnnnnnnnnnnnnnnnnnnnnnnnnnnnnnnnnnnnnnnnnnnnnnnnnnnnnnnnnnnnnnnnnnnnnnnnnnnnnnnnnnnnnnnnnnnnnnnnnnnnnnnnnnnnnnnnnnnnnnnnnnnnnnnnnnnnnnnnnnnnnnnnnnnnnnnnnnnnnnnnnnnnnnnnnnnnnnnnnnnnnnnnnnnnnnnnnnnnnnnnnnnnnnnnnnnnnnnnnnnnnnnnnnnnnnnnnnnnnnnnnnnnnnnnnnnnnnnnnnnnnnnnnnnnnnnnnnnnnnnnnnnnnnnnnnnnnnnnnnnnnnnnnnnnnnnnnnnnnnnnnnnnnnnnnnnnnnnnnnnnnnnnnnnnnnnnnnnnnnnnnnnnnnnnnnnnnnnnnnnnnnnnnnnnnnnnnnnnnnnnnnnnnnnnnnnnnnnnnnnnnnnnnnnnnnnnnnnnnnnnnnnnnnnnnnnnnnnnnnnnnnnnnnnnnnnnnnnnnnnnnnnnnnnnnnnnnnnnnnnnnnnnnnnnnnnnnnnnnnnnnnnnnnnnnnnnnnnnnnnnnnnnnnnnnnnnnnnnnnnnnnnnnnnnnnnnnnnnnnnnnnnnnnnnnnnnnnnnnnnnnnnnnnnnnnnnnnnnnnnnnnnnnnnnnnnnnnnnnnnnnnnnnnnnnnnnnnnnnnnnnnnnnnnnnnnnnnnnnnnnnnnnnnnnnnnnnnnnnnnnnnnnnnnnnnnnnnnnnnnnnnnnnnnnnnnnnnnnnnnnnnnnnnnnnnnnnnnnnnnnnnnnnnnnnnnnnnnnnnnnnnnnnnnnnnnnnnnnnnnnnnnnnnnnnnnnnnnnnnnnnnnnnnnnnnnnnnnnnnnnnnnnnnnnnnnnnnnnnnnnnnnnnnnnnnnnnnnnnnnnnnnnnnnnnnnnnnnnnnnnnnnnnnnnnnnnnnnnnnnnnnnnnnnnnnnnnnnnnnnnnnnnnnnnnnnnnnnnnnnnnnnnnnnnnnnnnnnnnnnnnnnnnnnnnnnnnnnnnnnnnnnnnnnnnnnnnnnnnnnnnnnnnnnnnnnnnnnnnnnnnnnnnnnnnnnnnnnnnnnnnnnnnnnnnnnnnnnnnnnnnnnnnnnnnnnnnnnnnnnnnnnnnnnnnnnnnnnnnnnnnnnnnnnnnnnnnnnnnnnnnnnnnnnnnnnnnnnnnnnnnnnnnnnnnnnnnnnnnnnnnnnnnnnnnnnnnnnnnnnnnnnnnnnnnnnnnnnnnnnnnnnnnnnnnnnnnnnnnnnnnnnnnnnnnnnnnnnnnnnnnnnnnnnnnnnnnnnnnnnnnnnnnnnnnnnnnnnnnnnnnnnnnnnnnnnnnnnnnnnnnnnnnnnnnnnnnnnnnnnnnnnnnnnnnnnnnnnnnnnnnnnnnnnnnnnnnnnnnnnnnnnnnnnnnnnnnnnnnnnnnnnnnnnnnnnnnnnnnnnnnnnnnnnnnnnnnnnnnnnnnnnnnnnnnnnnnnnnnnnnnnnnnnnnnnnnnnnnnnnnnnnnnnnnnnnnnnnnnnnnnnnnnnnnnnnnnnnnnnnnnnnnnnnnnnnnnnnnnnnnnnnnnnnnnnnnnnnnnnnnnnnnnnnnnnnnnnnnnnnnnnnnnnnnnnnnnnnnnnnnnnnnnnnnnnnnnnnnnnnnnnnnnnnnnnnnnnnnnnnnnnnnnnnnnnnnnnnnnnnnnnnnnnnnnnnnnnnnnnnnnnnnnnnnnnnnnnnnnnnnnnnnnnnnnnnnnnnnnnnnnnnnnnnnnnnnnnnnnnnnnnnnnnnnnnnnnnnnnnnnnnnnnnnnnnnnnnnnnnnnnnnnnnnnnnnnnnnnnnnnnnnnnnnnnnnnnnnnnnnnnnnnnnnnnnnnnnnnnnnnnnnnnnnnnnnnnnnnnnnnnnnnnnnnnnnnnnnnnnnnnnnnnnnnnnnnnnnnnnnnnnnnnnnnnnnnnnnnnnnnnnnnnnnnnnnnnnnnnnnnnnnnnnnnnnnnnnnnnnnnnnnnnnnnnnnnnnnnnnnnnnnnnnnnnnnnnnnnnnnnnnnnnnnnnnnnnnnnnnnnnnnnnnnnnnnnnnnnnnnnnnnnnnnnnnnnnnnnnnnnnnnnnnnnnnnnnnnnnnnnnnnnnnnnnnnnnnnnnnnnnnnnnnnnnnnnnnnnnnnnnnnnnnnnnnnnnnnnnnnnnnnnnnnnnnnnnnnnnnnnnnnnnnnnnnnnnnnnnnnnnnnnnnnnnnnnnnnnnnnnnnnnnnnnnnnnnnnnnnnnnnnnnnnnnnnnnnnnnnnnnnnnnnnnnnnnnnnnnnnnnnnnnnnnnnnnnnnnnnnnnnnnnnnnnnnnnnnnnnnnnnnnnnnnnnnnnnnnnnnnnnnnnnnnnnnnnnnnnnnnnnnnnnnnnnnnnnnnnnnnnnnnnnnnnnnnnnnnnnnnnnnnnnnnnnnnnnnnnnnnnnnnnnnnnnnnnnnnnnnnnnnnnnnnnnnnnnnnnnnnnnnnnnnnnnnnnnnnnnnnnnnnnnnnnnnnnnnnnnnnnnnnnnnnnnnnnnnnnnnnnnnnnnnnnnnnnnnnnnnnnnnnnnnnnnnnnnnnnnnnnnnnnnnnnnnnnnnnnnnnnnnnnnnnnnnnnnnnnnnnnnnnnnnnnnnnnnnnnnnnnnnnnnnnnnnnnnnnnnnnnnnnnnnnnnnnnnnnnnnnnnnnnnnnnnnnnnnnnnnnnnnnnnnnnnnnnnnnnnnnnnnnnnnnnnnnnnnnnnnnnnnnnnnnnnnnnnnnnnnnnnnnnnnnnnnnnnnnnnnnnnnnnnnnnnnnnnnnnnnnnnnnnnnnnnnnnnnnnnnnnnnnnnnnnnnnnnnnnnnnnnnnnnnnnnnnnnnnnnnnnnnnnnnnnnnnnnnnnnnnnnnnnnnnnnnnnnnnnnnnnnnnnnnnnnnnnnnnnnnnnnnnnnnnnnnnnnnnnnnnnnnnnnnnnnnnnnnnnnnnnnnnnnnnnnnnnnnnnnnnnnnnnnnnnnnnnnnnnnnnnnnnnnnnnnnnnnnnnnnnnnnnnnnnnnnnnnnnnnnnnnnnnnnnnnnnnnnnnnnnnnnnnnnnnnnnnnnnnnnnnnnnnnnnnnnnnnnnnnnnnnnnnnnnnnnnnnnnnnnnnnnnnnnnnnnnnnnnnnnnnnnnnnnnnnnnnnnnnnnnnnnnnnnnnnnnnnnnnnnnnnnnnnnnnnnnnnnnnnnnnnnnnnnnnnnnnnnnnnnnnnnnnnnnnnnnnnnnnnnnnnnnnnnnnnnnnnnnnnnnnnnnnnnnnnnnnnnnnnnnnnnnnnnnnnnnnnnnnnnnnnnnnnnnnnnnnnnnnnnnnnnnnnnnnnnnnnnnnnnnnnnnnnnnnnnnnnnnnnnnnnnnnnnnnnnnnnnnnnnnnnnnnnnnnnnnnnnnnnnnnnnnnnnnnnnnnnnnnnnnnnnnnnnnnnnnnnnnnnnnnnnnnnnnnnnnnnnnnnnnnnnnnnnnnnnnnnnnnnnnnnnnnnnnnnnnnnnnnnnnnnnnnnnnnnnnnnnnnnnnnnnnnnnnnnnnnnnnnnnnnnnnnnnnnnnnnnnnnnnnnnnnnnnnnnnnnnnnnnnnnnnnnnnnnnnnnnnnnnnnnnnnnnnnnnnnnnnnnnnnnnnnnnnnnnnnnnnnnnnnnnnnnnnnnnnnnnnnnnnnnnnnnnnnnnnnnnnnnnnnnnnnnnnnnnnnnnnnnnnnnnnnnnnnnnnnnnnnnnnnnnnnnnnnnnnnnnnnnnnnnnnnnnnnnnnnnnnnnnnnnnnnnnnnnnnnnnnnnnnnnnnnnnnnnnnnnnnnnnnnnnnnnnnnnnnnnnnnnnnnnnnnnnnnnnnnnnnnnnnnnnnnnnnnnnnnnnnnnnnnnnnnnnnnnnnnnnnnnnnnnnnnnnnnnnnnnnnnnnnnnnnnnnnnnnnnnnnnnnnnnnnnnnnnnnnnnnnnnnnnnnnnnnnnnnnnnnnnnnnnnnnnnnnnnnnnnnnnnnnnnnnnnnnnnnnnnnnnnnnnnnnnnnnnnnnnnnnnnnnnnnnnnnnnnnnnnnnnnnnnnnnnnnnnnnnnnnnnnnnnnnnnnnnnnnnnnnnnnnnnnnnnnnnnnnnnnnnnnnnnnnnnnnnnnnnnnnnnnnnnnnnnnnnnnnnnnnnnnnnnnnnnnnnnnnnnnnnnnnnnnnnnnnnnnnnnnnnnnnnnnnnnnnnnnnnnnnnnnnnnnnnnnnnnnnnnnnnnnnnnnnnnnnnnnnnnnnnnnnnnnnnnnnnnnnnnnnnnnnnnnnnnnnnnnnnnnnnnnnnnnnnnnnnnnnnnnnnnnnnnnnnnnnnnnnnnnnnnnnnnnnnnnnnnnnnnnnnnnnnnnnnnnnnnnnnnnnnnnnnnnnnnnnnnnnnnnnnnnnnnnnnnnnnnnnnnnnnnnnnnnnnnnnnnnnnnnnnnnnnnnnnnnnnnnnnnnnnnnnnnnnnnnnnnnnnnnnnnnnnnnnnnnnnnnnnnnnnnnnnnnnnnnnnnnnnnnnnnnnnnnnnnnnnnnnnnnnnnnnnnnnnnnnnnnnnnnnnnnnnnnnnnnnnnnnnnnnnnnnnnnnnnnnnnnnnnnnnnnnnnnnnnnnnnnnnnnnnnnnnnnnnnnnnnnnnnnnnnnnnnnnnnnnnnnnnnnnnnnnnnnnnnnnnnnnnnnnnnnnnnnnnnnnnnnnnnnnnnnnnnnnnnnnnnnnnnnnnnnnnnnnnnnnnnnnnnnnnnnnnnnnnnnnnnnnnnnnnnnnnnnnnnnnnnnnnnnnnnnnnnnnnnnnnnnnnnnnnnnnnnnnnnnnnnnnnnnnnnnnnnnnnnnnnnnnnnnnnnnnnnnnnnnnnnnnnnnnnnnnnnnnnnnnnnnnnnnnnnnnnnnnnnnnnnnnnnnnnnnnnnnnnnnnnnnnnnnnnnnnnnnnnnnnnnnnnnnnnnnnnnnnnnnnnnnnnnnnnnnnnnnnnnnnnnnnnnnnnnnnnnnnnnnnnnnnnnnnnnnnnnnnnnnnnnnnnnnnnnnnnnnnnnnnnnnnnnnnnnnnnnnnnnnnnnnnnnnnnnnnnnnnnnnnnnnnnnnnnnnnnnnnnnnnnnnnnnnnnnnnnnnnnnnnnnnnnnnnnnnnnnnnnnnnnnnnnnnnnnnnnnnnnnnnnnnnnnnnnnnnnnnnnnnnnnnnnnnnnnnnnnnnnnnnnnnnnnnnnnnnnnnnnnnnnnnnnnnnnnnnnnnnnnnnnnnnnnnnnnnnnnnnnnnnnnnnnnnnnnnnnnnnnnnnnnnnnnnnnnnnnnnnnnnnnnnnnnnnnnnnnnnnnnnnnnnnnnnnnnnnnnnnnnnnnnnnnnnnnnnnnnnnnnnnnnnnnnnnnnnnnnnnnnnnnnnnnnnnnnnnnnnnnnnnnnnnnnnnnnnnnnnnnnnnnnnnnnnnnnnnnnnnnnnnnnnnnnnnnnnnnnnnnnnnnnnnnnnnnnnnnnnnnnnnnnnnnnnnnnnnnnnnnnnnnnnnnnnnnnnnnnnnnnnnnnnnnnnnnnnnnnnnnnnnnnnnnnnnnnnnnnnnnnnnnnnnnnnnnnnnnnnnnnnnnnnnnnnnnnnnnnnnnnnnnnnnnnnnnnnnnnnnnnnnnnnnnnnnnnnnnnnnnnnnnnnnnnnnnnnnnnnnnnnnnnnnnnnnnnnnnnnnnnnnnnnnnnnnnnnnnnnnnnnnnnnnnnnnnnnnnnnnnnnnnnnnnnnnnnnnnnnnnnnnnnnnnnnnnnnnnnnnnnnnnnnnnnnnnnnnnnnnnnnnnnnnnnnnnnnnnnnnnnnnnnnnnnnnnnnnnnnnnnnnnnnnnnnnnnnnnnnnnnnnnnnnnnnnnnnnnnnnnnnnnnnnnnnnnnnnnnnnnnnnnnnnnnnnnnnnnnnnnnnnnnnnnnnnnnnnnnnnnnnnnnnnnnnnnnnnnnnnnnnnnnnnnnnnnnnnnnnnnnnnnnnnnnnnnnnnnnnnnnnnnnnnnnnnnnnnnnnnnnnnnnnnnnnnnnnnnnnnnnnnnnnnnnnnnnnnnnnnnnnnnnnnnnnnnnnnnnnnnnnnnnnnnnnnnnnnnnnnnnnnnnnnnnnnnnnnnnnnnnnnnnnnnnnnnnnnnnnnnnnnnnnnnnnnnnnnnnnnnnnnnnnnnnnnnnnnnnnnnnnnnnnnnnnnnnnnnnnnnnnnnnnnnnnnnnnnnnnnnnnnnnnnnnnnnnnnnnnnnnnnnnnnnnnnnnnnnnnnnnnnnnnnnnnnnnnnnnnnnnnnnnnnnnnnnnnnnnnnnnnnnnnnnnnnnnnnnnnnnnnnnnnnnnnnnnnnnnnnnnnnnnnnnnnnnnnnnnnnnnnnnnnnnnnnnnnnnnnnnnnnnnnnnnnnnnnnnnnnnnnnnnnnnnnnnnnnnnnnnnnnnnnnnnnnnnnnnnnnnnnnnnnnnnnnnnnnnnnnnnnnnnnnnnnnnnnnnnnnnnnnnnnnnnnnnnnnnnnnnnnnnnnnnnnnnnnnnnnnnnnnnnnnnnnnnnnnnnnnnnnnnnnnnnnnnnnnnnnnnnnnnnnnnnnnnnnnnnnnnnnnnnnnnnnnnnnnnnnnnnnnnnnnnnnnnnnnnnnnnnnnnnnnnnnnnnnnnnnnnnnnnnnnnnnnnnnnnnnnnnnnnnnnnnnnnnnnnnnnnnnnnnnnnnnnnnnnnnnnnnnnnnnnnnnnnnnnnnnnnnnnnnnnnnnnnnnnnnnnnnnnnnnnnnnnnnnnnnnnnnnnnnnnnnnnnnnnnnnnnnnnnnnnnnnnnnnnnnnnnnnnnnnnnnnnnnnnnnnnnnnnnnnnnnnnnnnnnnnnnnnnnnnnnnnnnnnnnnnnnnnnnnnnnnnnnnnnnnnnnnnnnnnnnnnnnnnnnnnnnnnnnnnnnnnnnnnnnnnnnnnnnnnnnnnnnnnnnnnnnnnnnnnnnnnnnnnnnnnnnnnnnnnnnnnnnnnnnnnnnnnnnnnnnnnnnnnnnnnnnnnnnnnnnnnnnnnnnnnnnnnnnnnnnnnnnnnnnnnnnnnnnnnnnnnnnnnnnnnnnnnnnnnnnnnnnnnnnnnnnnnnnnnnnnnnnnnnnnnnnnnnnnnnnnnnnnnnnnnnnnnnnnnnnnnnnnnnnnnnnnnnnnnnnnnnnnnnnnnnnnnnnnnnnnnnnnnnnnnnnnnnnnnnnnnnnnnnnnnnnnnnnnnnnnnnnnnnnnnnnnnnnnnnnnnnnnnnnnnnnnnnnnnnnnnnnnnnnnnnnnnnnnnnnnnnnnnnnnnnnnnnnnnnnnnnnnnnnnnnnnnnnnnnnnnnnnnnnnnnnnnnnnnnnnnnnnnnnnnnnnnnnnnnnnnnnnnnnnnnnnnnnnnnnnnnnnnnnnnnnnnnnnnnnnnnnnnnnnnnnnnnnnnnnnnnnnnnnnnnnnnnnnnnnnnnnnnnnnnnnnnnnnnnnnnnnnnnnnnnnnnnnnnnnnnnnnnnnnnnnnnnnnnnnnnnnnnnnnnnnnnnnnnnnnnnnnnnnnnnnnnnnnnnnnnnnnnnnnnnnnnnnnnnnnnnnnnnnnnnnnnnnnnnnnnnnnnnnnnnnnnnnnnnnnnnnnnnnnnnnnnnnnnnnnnnnnnnnnnnnnnnnnnnnnnnnnnnnnnnnnnnnnnnnnnnnnnnnnnnnnnnnnnnnnnnnnnnnnnnnnnnnnnnnnnnnnnnnnnnnnnnnnnnnnnnnnnnnnnnnnnnnnnnnnnnnnnnnnnnnnnnnnnnnnnnnnnnnnnnnnnnnnnnnnnnnnnnnnnnnnnnnnnnnnnnnnnnnnnnnnnnnnnnnnnnnnnnnnnnnnnnnnnnnnnnnnnnnnnnnnnnnnnnnnnnnnnnnnnnnnnnnnnnnnnnnnnnnnnnnnnnnnnnnnnnnnnnnnnnnnnnnnnnnnnnnnnnnnnnnnnnnnnnnnnnnnnnnnnnnnnnnnnnnnnnnnnnnnnnnnnnnnnnnnnnnnnnnnnnnnnnnnnnnnnnnnnnnnnnnnnnnnnnnnnnnnnnnnnnnnnnnnnnnnnnnnnnnnnnnnnnnnnnnnnnnnnnnnnnnnnnnnnnnnnnnnnnnnnnnnnnnnnnnnnnnnnnnnnnnnnnnnnnnnnnnnnnnnnnnnnnnnnnnnnnnnnnnnnnnnnnnnnnnnnnnnnnnnnnnnnnnnnnnnnnnnnnnnnnnnnnnnnnnnnnnnnnnnnnnnnnnnnnnnnnnnnnnnnnnnnnnnnnnnnnnnnnnnnnnnnnnnnnnnnnnnnnnnnnnnnnnnnnnnnnnnnnnnnnnnnnnnnnnnnnnnnnnnnnnnnnnnnnnnnnnnnnnnnnnnnnnnnnnnnnnnnnnnnnnnnnnnnnnnnnnnnnnnnnnnnnnnnnnnnnnnnnnnnnnnnnnnnnnnnnnnnnnnnnnnnnnnnnnnnnnnnnnnnnnnnnnnnnnnnnnnnnnnnnnnnnnnnnnnnnnnnnnnnnnnnnnnnnnnnnnnnnnnnnnnnnnnnnnnnnnnnnnnnnnnnnnnnnnnnnnnnnnnnnnnnnnnnnnnnnnnnnnnnnnnnnnnnnnnnnnnnnnnnnnnnnnnnnnnnnnnnnnnnnnnnnnnnnnnnnnnnnnnnnnnnnnnnnnnnnnnnnnnnnnnnnnnnnnnnnnnnnnnnnnnnnnnnnnnnnnnnnnnnnnnnnnnnnnnnnnnnnnnnnnnnnnnnnnnnnnnnnnnnnnnnnnnnnnnnnnnnnnnnnnnnnnnnnnnnnnnnnnnnnnnnnnnnnnnnnnnnnnnnnnnnnnnnnnnnnnnnnnnnnnnnnnnnnnnnnnnnnnnnnnnnnnnnnnnnnnnnnnnnnnnnnnnnnnnnnnnnnnnnnnnnnnnnnnnnnnnnnnnnnnnnnnnnnnnnnnnnnnnnnnnnnnnnnnnnnnnnnnnnnnnnnnnnnnnnnnnnnnnnnnnnnnnnnnnnnnnnnnnnnnnnnnnnnnnnnnnnnnnnnnnnnnnnnnnnnnnnnnnnnnnnnnnnnnnnnnnnnnnnnnnnnnnnnnnnnnnnnnnnnnnnnnnnnnnnnnnnnnnnnnnnnnnnnnnnnnnnnnnnnnnnnnnnnnnnnnnnnnnnnnnnnnnnnnnnnnnnnnnnnnnnnnnnnnnnnnnnnnnnnnnnnnnnnnnnnnnnnnnnnnnnnnnnnnnnnnnnnnnnnnnnnnnnnnnnnnnnnnnnnnnnnnnnnnnnnnnnnnnnnnnnnnnnnnnnnnnnnnnnnnnnnnnnnnnnnnnnnnnnnnnnnnnnnnnnnnnnnnnnnnnnnnnnnnnnnnnnnnnnnnnnnnnnnnnnnnnnnnnnnnnnnnnnnnnnnnnnnnnnnnnnnnnnnnnnnnnnnnnnnnnnnnnnnnnnnnnnnnnnnnnnnnnnnnnnnnnnnnnnnnnnnnnnnnnnnnnnnnnnnnnnnnnnnnnnnnnnnnnnnnnnnnnnnnnnnnnnnnnnnnnnnnnnnnnnnnnnnnnnnnnnnnnnnnnnnnnnnnnnnnnnnnnnnnnnnnnnnnnnnnnnnnnnnnnnnnnnnnnnnnnnnnnnnnnnnnnnnnnnnnnnnnnnnnnnnnnnnnnnnnnnnnnnnnnnnnnnnnnnnnnnnnnnnnnnnnnnnnnnnnnnnnnnnnnnnnnnnnnnnnnnnnnnnnnnnnnnnnnnnnnnnnnnnnnnnnnnnnnnnnnnnnnnnnnnnnnnnnnnnnnnnnnnnnnnnnnnnnnnnnnnnnnnnnnnnnnnnnnnnnnnnnnnnnnnnnnnnnnnnnnnnnnnnnnnnnnnnnnnnnnnnnnnnnnnnnnnnnnnnnnnnnnnnnnnnnnnnnnnnnnnnnnnnnnnnnnnnnnnnnnnnnnnnnnnnnnnnnnnnnnnnnnnnnnnnnnnnnnnnnnnnnnnnnnnnnnnnnnnnnnnnnnnnnnnnnnnnnnnnnnnnnnnnnnnnnnnnnnnnnnnnnnnnnnnnnnnnnnnnnnnnnnnnnnnnnnnnnnnnnnnnnnnnnnnnnnnnnnnnnnnnnnnnnnnnnnnnnnnnnnnnnnnnnnnnnnnnnnnnnnnnnnnnnnnnnnnnnnnnnnnnnnnnnnnnnnnnnnnnnnnnnnnnnnnnnnnnnnnnnnnnnnnnnnnnnnnnnnnnnnnnnnnnnnnnnnnnnnnnnnnnnnnnnnnnnnnnnnnnnnnnnnnnnnnnnnnnnnnnnnnnnnnnnnnnnnnnnnnnnnnnnnnnnnnnnnnnnnnnnnnnnnnnnnnnnnnnnnnnnnnnnnnnnnnnnnnnnnnnnnnnnnnnnnnnnnnnnnnnnnnnnnnnnnnnnnnnnnnnnnnnnnnnnnnnnnnnnnnnnnnnnnnnnnnnnnnnnnnnnnnnnnnnnnnnnnnnnnnnnnnnnnnnnnnnnnnnnnnnnnnnnnnnnnnnnnnnnnnnnnnnnnnnnnnnnnnnnnnnnnnnnnnnnnnnnnnnnnnnnnnnnnnnnnnnnnnnnnnnnnnnnnnnnnnnnnnnnnnnnnnnnnnnnnnnnnnnnnnnnnnnnnnnnnnnnnnnnnnnnnnnnnnnnnnnnnnnnnnnnnnnnnnnnnnnnnnnnnnnnnnnnnnnnnnnnnnnnnnnnnnnnnnnnnnnnnnnnnnnnnnnnnnnnnnnnnnnnnnnnnnnnnnnnnnnnnnnnnnnnnnnnnnnnnnnnnnnnnnnnnnnnnnnnnnnnnnnnnnnnnnnnnnnnnnnnnnnnnnnnnnnnnnnnnnnnnnnnnnnnnnnnnnnnnnnnnnnnnnnnnnnnnnnnnnnnnnnnnnnnnnnnnnnnnnnnnnnnnnnnnnnnnnnnnnnnnnnnnnnnnnnnnnnnnnnnnnnnnnnnnnnnnnnnnnnnnnnnnnnnnnnnnnnnnnnnnnnnnnnnnnnnnnnnnnnnnnnnnnnnnnnnnnnnnnnnnnnnnnnnnnnnnnnnnnnnnnnnnnnnnnnnnnnnnnnnnnnnnnnnnnnnnnnnnnnnnnnnnnnnnnnnnnnnnnnnnnnnnnnnnnnnnnnnnnnnnnnnnnnnnnnnnnnnnnnnnnnnnnnnnnnnnnnnnnnnnnnnnnnnnnnnnnnnnnnnnnnnnnnnnnnnnnnnnnnnnnnnnnnnnnnnnnnnnnnnnnnnnnnnnnnnnnnnnnnnnnnnnnnnnnnnnnnnnnnnnnnnnnnnnnnnnnnnnnnnnnnnnnnnnnnnnnnnnnnnnnnnnnnnnnnnnnnnnnnnnnnnnnnnnnnnnnnnnnnnnnnnnnnnnnnnnnnnnnnnnnnnnnnnnnnnnnnnnnnnnnnnnnnnnnnnnnnnnnnnnnnnnnnnnnnnnnnnnnnnnnnnnnnnnnnnnnnnnnnnnnnnnnnnnnnnnnnnnnnnnnnnnnnnnnnnnnnnnnnnnnnnnnnnnnnnnnnnnnnnnnnnnnnnnnnnnnnnnnnnnnnnnnnnnnnnnnnnnnnnnnnnnnnnnnnnnnnnnnnnnnnnnnnnnnnnnnnnnnnnnnnnnnnnnnnnnnnnnnnnnnnnnnnnnnnnnnnnnnnnnnnnnnnnnnnnnnnnnnnnnnnnnnnnnnnnnnnnnnnnnnnnnnnnnnnnnnnnnnnnnnnnnnnnnnnnnnnnnnnnnnnnnnnnnnnnnnnnnnnnnnnnnnnnnnnnnnnnnnnnnnnnnnnnnnnnnnnnnnnnnnnnnnnnnnnnnnnnnnnnnnnnnnnnnnnnnnnnnnnnnnnnnnnnnnnnnnnnnnnnnnnnnnnnnnnnnnnnnnnnnnnnnnnnnnnnnnnnnnnnnnnnnnnnnnnnnnnnnnnnnnnnnnnnnnnnnnnnnnnnnnnnnnnnnnnnnnnnnnnnnnnnnnnnnnnnnnnnnnnnnnnnnnnnnnnnnnnnnnnnnnnnnnnnnnnnnnnnnnnnnnnnnnnnnnnnnnnnnnnnnnnnnnnnnnnnnnnnnnnnnnnnnnnnnnnnnnnnnnnnnnnnnnnnnnnnnnnnnnnnnnnnnnnnnnnnnnnnnnnnnnnnnnnnnnnnnnnnnnnnnnnnnnnnnnnnnnnnnnnnnnnnnnnnnnnnnnnnnnnnnnnnnnnnnnnnnnnnnnnnnnnnnnnnnnnnnnnnnnnnnnnnnnnnnnnnnnnnnnnnnnnnnnnnnnnnnnnnnnnnnnnnnnnnnnnnnnnnnnnnnnnnnnnnnnnnnnnnnnnnnnnnnnnnnnnnnnnnnnnnnnnnnnnnnnnnnnnnnnnnnnnnnnnnnnnnnnnnnnnnnnnnnnnnnnnnnnnnnnnnnnnnnnnnnnnnnnnnnnnnnnnnnnnnnnnnnnnnnnnnnnnnnnnnnnnnnnnnnnnnnnnnnnnnnnnnnnnnnnnnnnnnnnnnnnnnnnnnnnnnnnnnnnnnnnnnnnnnnnnnnnnnnnnnnnnnnnnnnnnnnnnnnnnnnnnnnnnnnnnnnnnnnnnnnnnnnnnnnnnnnnnnnnnnnnnnnnnnnnnnnnnnnnnnnnnnnnnnnnnnnnnnnnnnnnnnnnnnnnnnnnnnnnnnnnnnnnnnnnnnnnnnnnnnnnnnnnnnnnnnnnnnnnnnnnnnnnnnnnnnnnnnnnnnnnnnnnnnnnnnnnnnnnnnnnnnnnnnnnnnnnnnnnnnnnnnnnnnnnnnnnnnnnnnnnnnnnnnnnnnnnnnnnnnnnnnnnnnnnnnnnnnnnnnnnnnnnnnnnnnnnnnnnnnnnnnnnnnnnnnnnnnnnnnnnnnnnnnnnnnnnnnnnnnnnnnnnnnnnnnnnnnnnnnnnnnnnnnnnnnnnnnnnnnnnnnnnnnnnnnnnnnnnnnnnnnnnnnnnnnnnnnnnnnnnnnnnnnnnnnnnnnnnnnnnnnnnnnnnnnnnnnnnnnnnnnnnnnnnnnnnnnnnnnnnnnnnnnnnnnnnnnnnnnnnnnnnnnnnnnnnnnnnnnnnnnnnnnnnnnnnnnnnnnnnnnnnnnnnnnnnnnnnnnnnnnnnnnnnnnnnnnnnnnnnnnnnnnnnnnnnnnnnnnnnnnnnnnnnnnnnnnnnnnnnnnnnnnnnnnnnnnnnnnnnnnnnnnnnnnnnnnnnnnnnnnnnnnnnnnnnnnnnnnnnnnnnnnnnnnnnnnnnnnnnnnnnnnnnnnnnnnnnnnnnnnnnnnnnnnnnnnnnnnnnnnnnnnnnnnnnnnnnnnnnnnnnnnnnnnnnnnnnnnnnnnnnnnnnnnnnnnnnnnnnnnnnnnnnnnnnnnnnnnnnnnnnnnnnnnnnnnnnnnnnnnnnnnnnnnnnnnnnnnnnnnnnnnnnnnnnnnnnnnnnnnnnnnnnnnnnnnnnnnnnnnnnnnnnnnnnnnnnnnnnnnnnnnnnnnnnnnnnnnnnnnnnnnnnnnnnnnnnnnnnnnnnnnnnnnnnnnnnnnnnnnnnnnnnnnnnnnnnnnnnnnnnnnnnnnnnnnnnnnnnnnnnnnnnnnnnnnnnnnnnnnnnnnnnnnnnnnnnnnnnnnnnnnnnnnnnnnnnnnnnnnnnnnnnnnnnnnnnnnnnnnnnnnnnnnnnnnnnnnnnnnnnnnnnnnnnnnnnnnnnnnnnnnnnnnnnnnnnnnnnnnnnnnnnnnnnnnnnnnnnnnnnnnnnnnnnnnnnnnnnnnnnnnnnnnnnnnnnnnnnnnnnnnnnnnnnnnnnnnnnnnnnnnnnnnnnnnnnnnnnnnnnnnnnnnnnnnnnnnnnnnnnnnnnnnnnnnnnnnnnnnnnnnnnnnnnnnnnnnnnnnnnnnnnnnnnnnnnnnnnnnnnnnnnnnnnnnnnnnnnnnnnnnnnnnnnnnnnnnnnnnnnnnnnnnnnnnnnnnnnnnnnnnnnnnnnnnnnnnnnnnnnnnnnnnnnnnnnnnnnnnnnnnnnnnnnnnnnnnnnnnnnnnnnnnnnnnnnnnnnnnnnnnnnnnnnnnnnnnnnnnnnnnnnnnnnnnnnnnnnnnnnnnnnnnnnnnnnnnnnnnnnnnnnnnnnnnnnnnnnnnnnnnnnnnnnnnnnnnnnnnnnnnnnnnnnnnnnnnnnnnnnnnnnnnnnnnnnnnnnnnnnnnnnnnnnnnnnnnnnnnnnnnnnnnnnnnnnnnnnnnnnnnnnnnnnnnnnnnnnnnnnnnnnnnnnnnnnnnnnnnnnnnnnnnnnnnnnnnnnnnnnnnnnnnnnnnnnnnnnnnnnnnnnnnnnnnnnnnnnnnnnnnnnnnnnnnnnnnnnnnnnnnnnnnnnnnnnnnnnnnnnnnnnnnnnnnnnnnnnnnnnnnnnnnnnnnnnnnnnnnnnnnnnnnnnnnnnnnnnnnnnnnnnnnnnnnnnnnnnnnnnnnnnnnnnnnnnnnnnnnnnnnnnnnnnnnnnnnnnnnnnnnnnnnnnnnnnnnnnnnnnnnnnnnnnnnnnnnnnnnnnnnnnnnnnnnnnnnnnnnnnnnnnnnnnnnnnnnnnnnnnnnnnnnnnnnnnnnnnnnnnnnnnnnnnnnnnnnnnnnnnnnnnnnnnnnnnnnnnnnnnnnnnnnnnnnnnnnnnnnnnnnnnnnnnnnnnnnnnnnnnnnnnnnnnnnnnnnnnnnnnnnnnnnnnnnnnnnnnnnnnnnnnnnnnnnnnnnnnnnnnnnnnnnnnnnnnnnnnnnnnnnnnnnnnnnnnnnnnnnnnnnnnnnnnnnnnnnnnnnnnnnnnnnnnnnnnnnnnnnnnnnnnnnnnnnnnnnnnnnnnnnnnnnnnnnnnnnnnnnnnnnnnnnnnnnnnnnnnnnnnnnnnnnnnnnnnnnnnnnnnnnnnnnnnnnnnnnnnnnnnnnnnnnnnnnnnnnnnnnnnnnnnnnnnnnnnnnnnnnnnnnnnnnnnnnnnnnnnnnnnnnnnnnnnnnnnnnnnnnnnnnnnnnnnnnnnnnnnnnnnnnnnnnnnnnnnnnnnnnnnnnnnnnnnnnnnnnnnnnnnnnnnnnnnnnnnnnnnnnnnnnnnnnnnnnnnnnnnnnnnnnnnnnnnnnnnnnnnnnnnnnnnnnnnnnnnnnnnnnnnnnnnnnnnnnnnnnnnnnnnnnnnnnnnnnnnnnnnnnnnnnnnnnnnnnnnnnnnnnnnnnnnnnnnnnnnnnnnnnnnnnnnnnnnnnnnnnnnnnnnnnnnnnnnnnnnnnnnnnnnnnnnnnnnnnnnnnnnnnnnnnnnnnnnnnnnnnnnnnnnnnnnnnnnnnnnnnnnnnnnnnnnnnnnnnnnnnnnnnnnnnnnnnnnnnnnnnnnnnnnnnnnnnnnnnnnnnnnnnnnnnnnnnnnnnnnnnnnnnnnnnnnnnnnnnnnnnnnnnnnnnnnnnnnnnnnnnnnnnnnnnnnnnnnnnnnnnnnnnnnnnnnnnnnnnnnnnnnnnnnnnnnnnnnnnnnnnnnnnnnnnnnnnnnnnnnnnnnnnnnnnnnnnnnnnnnnnnnnnnnnnnnnnnnnnnnnnnnnnnnnnnnnnnnnnnnnnnnnnnnnnnnnnnnnnnnnnnnnnnnnnnnnnnnnnnnnnnnnnnnnnnnnnnnnnnnnnnnnnnnnnnnnnnnnnnnnnnnnnnnnnnnnnnnnnnnnnnnnnnnnnnnnnnnnnnnnnnnnnnnnnnnnnnnnnnnnnnnnnnnnnnnnnnnnnnnnnnnnnnnnnnnnnnnnnnnnnnnnnnnnnnnnnnnnnnnnnnnnnnnnnnnnnnnnnnnnnnnnnnnnnnnnnnnnnnnnnnnnnnnnnnnnnnnnnnnnnnnnnnnnnnnnnnnnnnnnnnnnnnnnnnnnnnnnnnnnnnnnnnnnnnnnnnnnnnnnnnnnnnnnnnnnnnnnnnnnnnnnnnnnnnnnnnnnnnnnnnnnnnnnnnnnnnnnnnnnnnnnnnnnnnnnnnnnnnnnnnnnnnnnnnnnnnnnnnnnnnnnnnnnnnnnnnnnnnnnnnnnnnnnnnnnnnnnnnnnnnnnnnnnnnnnnnnnnnnnnnnnnnnnnnnnnnnnnnnnnnnnnnnnnnnnnnnnnnnnnnnnnnnnnnnnnnnnnnnnnnnnnnnnnnnnnnnnnnnnnnnnnnnnnnnnnnnnnnnnnnnnnnnnnnnnnnnnnnnnnnnnnnnnnnnnnnnnnnnnnnnnnnnnnnnnnnnnnnnnnnnnnnnnnnnnnnnnnnnnnnnnnnnnnnnnnnnnnnnnnnnnnnnnnnnnnnnnnnnnnnnnnnnnnnnnnnnnnnnnnnnnnnnnnnnnnnnnnnnnnnnnnnnnnnnnnnnnnnnnnnnnnnnnnnnnnnnnnnnnnnnnnnnnnnnnnnnnnnnnnnnnnnnnnnnnnnnnnnnnnnnnnnnnnnnnnnnnnnnnnnnnnnnnnnnnnnnnnnnnnnnnnnnnnnnnnnnnnnnnnnnnnnnnnnnnnnnnnnnnnnnnnnnnnnnnnnnnnnnnnnnnnnnnnnnnnnnnnnnnnnnnnnnnnnnnnnnnnnnnnnnnnnnnnnnnnnnnnnnnnnnnnnnnnnnnnnnnnnnnnnnnnnnnnnnnnnnnnnnnnnnnnnnnnnnnnnnnnnnnnnnnnnnnnnnnnnnnnnnnnnnnnnnnnnnnnnnnnnnnnnnnnnnnnnnnnnnnnnnnnnnnnnnnnnnnnnnnnnnnnnnnnnnnnnnnnnnnnnnnnnnnnnnnnnnnnnnnnnnnnnnnnnnnnnnnnnnnnnnnnnnnnnnnnnnnnnnnnnnnnnnnnnnnnnnnnnnnnnnnnnnnnnnnnnnnnnnnnnnnnnnnnnnnnnnnnnnnnnnnnnnnnnnnnnnnnnnnnnnnnnnnnnnnnnnnnnnnnnnnnnnnnnnnnnnnnnnnnnnnnnnnnnnnnnnnnnnnnnnnnnnnnnnnnnnnnnnnnnnnnnnnnnnnnnnnnnnnnnnnnnnnnnnnnnnnnnnnnnnnnnnnnnnnnnnnnnnnnnnnnnnnnnnnnnnnnnnnnnnnnnnnnnnnnnnnnnnnnnnnnnnnnnnnnnnnnnnnnnnnnnnnnnnnnnnnnnnnnnnnnnnnnnnnnnnnnnnnnnnnnnnnnnnnnnnnnnnnnnnnnnnnnnnnnnnnnnnnnnnnnnnnnnnnnnnnnnnnnnnnnnnnnnnnnnnnnnnnnnnnnnnnnnnnnnnnnnnnnnnnnnnnnnnnnnnnnnnnnnnnnnnnnnnnnnnnnnnnnnnnnnnnnnnnnnnnnnnnnnnnnnnnnnnnnnnnnnnnnnnnnnnnnnnnnnnnnnnnnnnnnnnnnnnnnnnnnnnnnnnnnnnnnnnnnnnnnnnnnnnnnnnnnnnnnnnnnnnnnnnnnnnnnnnnnnnnnnnnnnnnnnnnnnnnnnnnnnnnnnnnnnnnnnnnnnnnnnnnnnnnnnnnnnnnnnnnnnnnnnnnnnnnnnnnnnnnnnnnnnnnnnnnnnnnnnnnnnnnnnnnnnnnnnnnnnnnnnnnnnnnnnnnnnnnnnnnnnnnnnnnnnnnnnnnnnnnnnnnnnnnnnnnnnnnnnnnnnnnnnnnnnnnnnnnnnnnnnnnnnnnnnnnnnnnnnnnnnnnnnnnnnnnnnnnnnnnnnnnnnnnnnnnnnnnnnnnnnnnnnnnnnnnnnnnnnnnnnnnnnnnnnnnnnnnnnnnnnnnnnnnnnnnnnnnnnnnnnnnnnnnnnnnnnnnnnnnnnnnnnnnnnnnnnnnnnnnnnnnnnnnnnnnnnnnnnnnnnnnnnnnnnnnnnnnnnnnnnnnnnnnnnnnnnnnnnnnnnnnnnnnnnnnnnnnnnnnnnnnnnnnnnnnnnnnnnnnnnnnnnnnnnnnnnnnnnnnnnnnnnnnnnnnnnnnnnnnnnnnnnnnnnnnnnnnnnnnnnnnnnnnnnnnnnnnnnnnnnnnnnnnnnnnnnnnnnnnnnnnnnnnnnnnnnnnnnnnnnnnnnnnnnnnnnnnnnnnnnnnnnnnnnnnnnnnnnnnnnnnnnnnnnnnnnnnnnnnnnnnnnnnnnnnnnnnnnnnnnnnnnnnnnnnnnnnnnnnnnnnnnnnnnnnnnnnnnnnnnnnnnnnnnnnnnnnnnnnnnnnnnnnnnnnnnnnnnnnnnnnnnnnnnnnnnnnnnnnnnnnnnnnnnnnnnnnnnnnnnnnnnnnnnnnnnnnnnnnnnnnnnnnnnnnnnnnnnnnnnnnnnnnnnnnnnnnnnnnnnnnnnnnnnnnnnnnnnnnnnnnnnnnnnnnnnnnnnnnnnnnnnnnnnnnnnnnnnnnnnnnnnnnnnnnnnnnnnnnnnnnnnnnnnnnnnnnnnnnnnnnnnnnnnnnnnnnnnnnnnnnnnnnnnnnnnnnnnnnnnnnnnnnnnnnnnnnnnnnnnnnnnnnnnnnnnnnnnnnnnnnnnnnnnnnnnnnnnnnnnnnnnnnnnnnnnnnnnnnnnnnnnnnnnnnnnnnnnnnnnnnnnnnnnnnnnnnnnnnnnnnnnnnnnnnnnnnnnnnnnnnnnnnnnnnnnnnnnnnnnnnnnnnnnnnnnnnnnnnnnnnnnnnnnnnnnnnnnnnnnnnnnnnnnnnnnnnnnnnnnnnnnnnnnnnnnnnnnnnnnnnnnnnnnnnnnnnnnnnnnnnnnnnnnnnnnnnnnnnnnnnnnnnnnnnnnnnnnnnnnnnnnnnnnnnnnnnnnnnnnnnnnnnnnnnnnnnnnnnnnnnnnnnnnnnnnnnnnnnnnnnnnnnnnnnnnnnnnnnnnnnnnnnnnnnnnnnnnnnnnnnnnnnnnnnnnnnnnnnnnnnnnnnnnnnnnnnnnnnnnnnnnnnnnnnnnnnnnnnnnnnnnnnnnnnnnnnnnnnnnnnnnnnnnnnnnnnnnnnnnnnnnnnnnnnnnnnnnnnnnnnnnnnnnnnnnnnnnnnnnnnnnnnnnnnnnnnnnnnnnnnnnnnnnnnnnnnnnnnnnnnnnnnnnnnnnnnnnnnnnnnnnnnnnnnnnnnnnnnnnnnnnnnnnnnnnnnnnnnnnnnnnnnnnnnnnnnnnnnnnnnnnnnnnnnnnnnnnnnnnnnnnnnnnnnnnnnnnnnnnnnnnnnnnnnnnnnnnnnnnnnnnnnnnnnnnnnnnnnnnnnnnnnnnnnnnnnnnnnnnnnnnnnnnnnnnnnnnnnnnnnnnnnnnnnnnnnnnnnnnnnnnnnnnnnnnnnnnnnnnnnnnnnnnnnnnnnnnnnnnnnnnnnnnnnnnnnnnnnnnnnnnnnnnnnnnnnnnnnnnnnnnnnnnnnnnnnnnnnnnnnnnnnnnnnnnnnnnnnnnnnnnnnnnnnnnnnnnnnnnnnnnnnnnnnnnnnnnnnnnnnnnnnnnnnnnnnnnnnnnnnnnnnnnnnnnnnnnnnnnnnnnnnnnnnnnnnnnnnnnnnnnnnnnnnnnnnnnnnnnnnnnnnnnnnnnnnnnnnnnnnnnnnnnnnnnnnnnnnnnnnnnnnnnnnnnnnnnnnnnnnnnnnnnnnnnnnnnnnnnnnnnnnnnnnnnnnnnnnnnnnnnnnnnnnnnnnnnnnnnnnnnnnnnnnnnnnnnnnnnnnnnnnnnnnnnnnnnnnnnnnnnnnnnnnnnnnnnnnnnnnnnnnnnnnnnnnnnnnnnnnnnnnnnnnnnnnnnnnnnnnnnnnnnnnnnnnnnnnnnnnnnnnnnnnnnnnnnnnnnnnnnnnnnnnnnnnnnnnnnnnnnnnnnnnnnnnnnnnnnnnnnnnnnnnnnnnnnnnnnnnnnnnnnnnnnnnnnnnnnnnnnnnnnnnnnnnnnnnnnnnnnnnnnnnnnnnnnnnnnnnnnnnnnnnnnnnnnnnnnnnnnnnnnnnnnnnnnnnnnnnnnnnnnnnnnnnnnnnnnnnnnnnnnnnnnnnnnnnnnnnnnnnnnnnnnnnnnnnnnnnnnnnnnnnnnnnnnnnnnnnnnnnnnnnnnnnnnnnnnnnnnnnnnnnnnnnnnnnnnnnnnnnnnnnnnnnnnnnnnnnnnnnnnnnnnnnnnnnnnnnnnnnnnnnnnnnnnnnnnnnnnnnnnnnnnnnnnnnnnnnnnnnnnnnnnnnnnnnnnnnnnnnnnnnnnnnnnnnnnnnnnnnnnnnnnnnnnnnnnnnnnnnnnnnnnnnnnnnnnnnnnnnnnnnnnnnnnnnnnnnnnnnnnnnnnnnnnnnnnnnnnnnnnnnnnnnnnnnnnnnnnnnnnnnnnnnnnnnnnnnnnnnnnnnnnnnnnnnnnnnnnnnnnnnnnnnnnnnnnnnnnnnnnnnnnnnnnnnnnnnnnnnnnnnnnnnnnnnnnnnnnnnnnnnnnnnnnnnnnnnnnnnnnnnnnnnnnnnnnnnnnnnnnnnnnnnnnnnnnnnnnnnnnnnnnnnnnnnnnnnnnnnnnnnnnnnnnnnnnnnnnnnnnnnnnnnnnnnnnnnnnnnnnnnnnnnnnnnnnnnnnnnnnnnnnnnnnnnnnnnnnnnnnnnnnnnnnnnnnnnnnnnnnnnnnnnnnnnnnnnnnnnnnnnnnnnnnnnnnnnnnnnnnnnnnnnnnnnnnnnnnnnnnnnnnnnnnnnnnnnnnnnnnnnnnnnnnnnnnnnnnnnnnnnnnnnnnnnnnnnnnnnnnnnnnnnnnnnnnnnnnnnnnnnnnnnnnnnnnnnnnnnnnnnnnnnnnnnnnnnnnnnnnnnnnnnnnnnnnnnnnnnnnnnnnnnnnnnnnnnnnnnnnnnnnnnnnnnnnnnnnnnnnnnnnnnnnnnnnnnnnnnnnnnnnnnnnnnnnnnnnnnnnnnnnnnnnnnnnnnnnnnnnnnnnnnnnnnnnnnnnnnnnnnnnnnnnnnnnnnnnnnnnnnnnnnnnnnnnnnnnnnnnnnnnnnnnnnnnnnnnnnnnnnnnnnnnnnnnnnnnnnnnnnnnnnnnnnnnnnnnnnnnnnnnnnnnnnnnnnnnnnnnnnnnnnnnnnnnnnnnnnnnnnnnnnnnnnnnnnnnnnnnnnnnnnnnnnnnnnnnnnnnnnnnnnnnnnnnnnnnnnnnnnnnnnnnnnnnnnnnnnnnnnnnnnnnnnnnnnnnnnnnnnnnnnnnnnnnnnnnnnnnnnnnnnnnnnnnnnnnnnnnnnnnnnnnnnnnnnnnnnnnnnnnnnnnnnnnnnnnnnnnnnnnnnnnnnnnnnnnnnnnnnnnnnnnnnnnnnnnnnnnnnnnnnnnnnnnnnnnnnnnnnnnnnnnnnnnnnnnnnnnnnnnnnnnnnnnnnnnnnnnnnnnnnnnnnnnnnnnnnnnnnnnnnnnnnnnnnnnnnnnnnnnnnnnnnnnnnnnnnnnnnnnnnnnnnnnnnnnnnnnnnnnnnnnnnnnnnnnnnnnnnnnnnnnnnnnnnnnnnnnnnnnnnnnnnnnnnnnnnnnnnnnnnnnnnnnnnnnnnnnnnnnnnnnnnnnnnnnnnnnnnnnnnnnnnnnnnnnnnnnnnnnnnnnnnnnnnnnnnnnnnnnnnnnnnnnnnnnnnnnnnnnnnnnnnnnnnnnnnnnnnnnnnnnnnnnnnnnnnnnnnnnnnnnnnnnnnnnnnnnnnnnnnnnnnnnnnnnnnnnnnnnnnnnnnnnnnnnnnnnnnnnnnnnnnnnnnnnnnnnnnnnnnnnnnnnnnnnnnnnnnnnnnnnnnnnnnnnnnnnnnnnnnnnnnnnnnnnnnnnnnnnnnnnnnnnnnnnnnnnnnnnnnnnnnnnnnnnnnnnnnnnnnnnnnnnnnnnnnnnnnnnnnnnnnnnnnnnnnnnnnnnnnnnnnnnnnnnnnnnnnnnnnnnnnnnnnnnnnnnnnnnnnnnnnnnnnnnnnnnnnnnnnnnnnnnnnnnnnnnnnnnnnnnnnnnnnnnnnnnnnnnnnnnnnnnnnnnnnnnnnnnnnnnnnnnnnnnnnnnnnnnnnnnnnnnnnnnnnnnnnnnnnnnnnnnnnnnnnnnnnnnnnnnnnnnnnnnnnnnnnnnnnnnnnnnnnnnnnnnnnnnnnnnnnnnnnnnnnnnnnnnnnnnnnnnnnnnnnnnnnnnnnnnnnnnnnnnnnnnnnnnnnnnnnnnnnnnnnnnnnnnnnnnnnnnnnnnnnnnnnnnnnnnnnnnnnnnnnnnnnnnnnnnnnnnnnnnnnnnnnnnnnnnnnnnnnnnnnnnnnnnnnnnnnnnnnnnnnnnnnnnnnnnnnnnnnnnnnnnnnnnnnnnnnnnnnnnnnnnnnnnnnnnnnnnnnnnnnnnnnnnnnnnnnnnnnnnnnnnnnnnnnnnnnnnnnnnnnnnnnnnnnnnnnnnnnnnnnnnnnnnnnnnnnnnnnnnnnnnnnnnnnnnnnnnnnnnnnnnnnnnnnnnnnnnnnnnnnnnnnnnnnnnnnnnnnnnnnnnnnnnnnnnnnnnnnnnnnnnnnnnnnnnnnnnnnnnnnnnnnnnnnnnnnnnnnnnnnnnnnnnnnnnnnnnnnnnnnnnnnnnnnnnnnnnnnnnnnnnnnnnnnnnnnnnnnnnnnnnnnnnnnnnnnnnnnnnnnnnnnnnnnnnnnnnnnnnnnnnnnnnnnnnnnnnnnnnnnnnnnnnnnnnnnnnnnnnnnnnnnnnnnnnnnnnnnnnnnnnnnnnnnnnnnnnnnnnnnnnnnnnnnnnnnnnnnnnnnnnnnnnnnnnnnnnnnnnnnnnnnnnnnnnnnnnnnnnnnnnnnnnnnnnnnnnnnnnnnnnnnnnnnnnnnnnnnnnnnnnnnnnnnnnnnnnnnnnnnnnnnnnnnnnnnnnnnnnnnnnnnnnnnnnnnnnnnnnnnnnnnnnnnnnnnnnnnnnnnnnnnnnnnnnnnnnnnnnnnnnnnnnnnnnnnnnnnnnnnnnnnnnnnnnnnnnnnnnnnnnnnnnnnnnnnnnnnnnnnnnnnnnnnnnnnnnnnnnnnnnnnnnnnnnnnnnnnnnnnnnnnnnnnnnnnnnnnnnnnnnnnnnnnnnnnnnnnnnnnnnnnnnnnnnnnnnnnnnnnnnnnnnnnnnnnnnnnnnnnnnnnnnnnnnnnnnnnnnnnnnnnnnnnnnnnnnnnnnnnnnnnnnnnnnnnnnnnnnnnnnnnnnnnnnnnnnnnnnnnnnnnnnnnnnnnnnnnnnnnnnnnnnnnnnnnnnnnnnnnnnnnnnnnnnnnnnnnnnnnnnnnnnnnnnnnnnnnnnnnnnnnnnnnnnnnnnnnnnnnnnnnnnnnnnnnnnnnnnnnnnnnnnnnnnnnnnnnnnnnnnnnnnnnnnnnnnnnnnnnnnnnnnnnnnnnnnnnnnnnnnnnnnnnnnnnnnnnnnnnnnnnnnnnnnnnnnnnnnnnnnnnnnnnnnnnnnnnnnnnnnnnnnnnnnnnnnnnnnnnnnnnnnnnnnnnnnnnnnnnnnnnnnnnnnnnnnnnnnnnnnnnnnnnnnnnnnnnnnnnnnnnnnnnnnnnnnnnnnnnnnnnnnnnnnnnnnnnnnnnnnnnnnnnnnnnnnnnnnnnnnnnnnnnnnnnnnnnnnnnnnnnnnnnnnnnnnnnnnnnnnnnnnnnnnnnnnnnnnnnnnnnnnnnnnnnnnnnnnnnnnnnnnnnnnnnnnnnnnnnnnnnnnnnnnnnnnnnnnnnnnnnnnnnnnnnnnnnnnnnnnnnnnnnnnnnnnnnnnnnnnnnnnnnnnnnnnnnnnnnnnnnnnnnnnnnnnnnnnnnnnnnnnnnnnnnnnnnnnnnnnnnnnnnnnnnnnnnnnnnnnnnnnnnnnnnnnnnnnnnnnnnnnnnnnnnnnnnnnnnnnnnnnnnnnnnnnnnnnnnnnnnnnnnnnnnnnnnnnnnnnnnnnnnnnnnnnnnnnnnnnnnnnnnnnnnnnnnnnnnnnnnnnnnnnnnnnnnnnnnnnnnnnnnnnnnnnnnnnnnnnnnnnnnnnnnnnnnnnnnnnnnnnnnnnnnnnnnnnnnnnnnnnnnnnnnnnnnnnnnnnnnnnnnnnnnnnnnnnnnnnnnnnnnnnnnnnnnnnnnnnnnnnnnnnnnnnnnnnnnnnnnnnnnnnnnnnnnnnnnnnnnnnnnnnnnnnnnnnnnnnnnnnnnnnnnnnnnnnnnnnnnnnnnnnnnnnnnnnnnnnnnnnnnnnnnnnnnnnnnnnnnnnnnnnnnnnnnnnnnnnnnnnnnnnnnnnnnnnnnnnnnnnnnnnnnnnnnnnnnnnnnnnnnnnnnnnnnnnnnnnnnnnnnnnnnnnnnnnnnnnnnnnnnnnnnnnnnnnnnnnnnnnnnnnnnnnnnnnnnnnnnnnnnnnnnnnnnnnnnnnnnnnnnnnnnnnnnnnnnnnnnnnnnnnnnnnnnnnnnnnnnnnnnnnnnnnnnnnnnnnnnnnnnnnnnnnnnnnnnnnnnnnnnnnnnnnnnnnnnnnnnnnnnnnnnnnnnnnnnnnnnnnnnnnnnnnnnnnnnnnnnnnnnnnnnnnnnnnnnnnnnnnnnnnnnnnnnnnnnnnnnnnnnnnnnnnnnnnnnnnnnnnnnnnnnnnnnnnnnnnnnnnnnnnnnnnnnnnnnnnnnnnnnnnnnnnnnnnnnnnnnnnnnnnnnnnnnnnnnnnnnnnnnnnnnnnnnnnnnnnnnnnnnnnnnnnnnnnnnnnnnnnnnnnnnnnnnnnnnnnnnnnnnnnnnnnnnnnnnnnnnnnnnnnnnnnnnnnnnnnnnnnnnnnnnnnnnnnnnnnnnnnnnnnnnnnnnnnnnnnnnnnnnnnnnnnnnnnnnnnnnnnnnnnnnnnnnnnnnnnnnnnnnnnnnnnnnnnnnnnnnnnnnnnnnnnnnnnnnnnnnnnnnnnnnnnnnnnnnnnnnnnnnnnnnnnnnnnnnnnnnnnnnnnnnnnnnnnnnnnnnnnnnnnnnnnnnnnnnnnnnnnnnnnnnnnnnnnnnnnnnnnnnnnnnnnnnnnnnnnnnnnnnnnnnnnnnnnnnnnnnnnnnnnnnnnnnnnnnnnnnnnnnnnnnnnnnnnnnnnnnnnnnnnnnnnnnnnnnnnnnnnnnnnnnnnnnnnnnnnnnnnnnnnnnnnnnnnnnnnnnnnnnnnnnnnnnnnnnnnnnnnnnnnnnnnnnnnnnnnnnnnnnnnnnnnnnnnnnnnnnnnnnnnnnnnnnnnnnnnnnnnnnnnnnnnnnnnnnnnnnnnnnnnnnnnnnnnnnnnnnnnnnnnnnnnnnnnnnnnnnnnnnnnnnnnnnnnnnnnnnnnnnnnnnnnnnnnnnnnnnnnnnnnnnnnnnnnnnnnnnnnnnnnnnnnnnnnnnnnnnnnnnnnnnnnnnnnnnnnnnnnnnnnnnnnnnnnnnnnnnnnnnnnnnnnnnnnnnnnnnnnnnnnnnnnnnnnnnnnnnnnnnnnnnnnnnnnnnnnnnnnnnnnnnnnnnnnnnnnnnnnnnnnnnnnnnnnnnnnnnnnnnnnnnnnnnnnnnnnnnnnnnnnnnnnnnnnnnnnnnnnnnnnnnnnnnnnnnnnnnnnnnnnnnnnnnnnnnnnnnnnnnnnnnnnnnnnnnnnnnnnnnnnnnnnnnnnnnnnnnnnnnnnnnnnnnnnnnnnnnnnnnnnnnnnnnnnnnnnnnnnnnnnnnnnnnnnnnnnnnnnnnnnnnnnnnnnnnnnnnnnnnnnnnnnnnnnnnnnnnnnnnnnnnnnnnnnnnnnnnnnnnnnnnnnnnnnnnnnnnnnnnnnnnnnnnnnnnnnnnnnnnnnnnnnnnnnnnnnnnnnnnnnnnnnnnnnnnnnnnnnnnnnnnnnnnnnnnnnnnnnnnnnnnnnnnnnnnnnnnnnnnnnnnnnnnnnnnnnnnnnnnnnnnnnnnnnnnnnnnnnnnnnnnnnnnnnnnnnnnnnnnnnnnnnnnnnnnnnnnnnnnnnnnnnnnnnnnnnnnnnnnnnnnnnnnnnnnnnnnnnnnnnnnnnnnnnnnnnnnnnnnnnnnnnnnnnnnnnnnnnnnnnnnnnnnnnnnnnnnnnnnnnnnnnnnnnnnnnnnnnnnnnnnnnnnnnnnnnnnnnnnnnnnnnnnnnnnnnnnnnnnnnnnnnnnnnnnnnnnnnnnnnnnnnnnnnnnnnnnnnnnnnnnnnnnnnnnnnnnnnnnnnnnnnnnnnnnnnnnnnnnnnnnnnnnnnnnnnnnnnnnnnnnnnnnnnnnnnnnnnnnnnnnnnnnnnnnnnnnnnnnnnnnnnnnnnnnnnnnnnnnnnnnnnnnnnnnnnnnnnnnnnnnnnnnnnnnnnnnnnnnnnnnnnnnnnnnnnnnnnnnnnnnnnnnnnnnnnnnnnnnnnnnnnnnnnnnnnnnnnnnnnnnnnnnnnnnnnnnnnnnnnnnnnnnnnnnnnnnnnnnnnnnnnnnnnnnnnnnnnnnnnnnnnnnnnnnnnnnnnnnnnnnnnnnnnnnnnnnnnnnnnnnnnnnnnnnnnnnnnnnnnnnnnnnnnnnnnnnnnnnnnnnnnnnnnnnnnnnnnnnnnnnnnnnnnnnnnnnnnnnnnnnnnnnnnnnnnnnnnnnnnnnnnnnnnnnnnnnnnnnnnnnnnnnnnnnnnnnnnnnnnnnnnnnnnnnnnnnnnnnnnnnnnnnnnnnnnnnnnnnnnnnnnnnnnnnnnnnnnnnnnnnnnnnnnnnnnnnnnnnnnnnnnnnnnnnnnnnnnnnnnnnnnnnnnnnnnnnnnnnnnnnnnnnnnnnnnnnnnnnnnnnnnnnnnnnnnnnnnnnnnnnnnnnnnnnnnnnnnnnnnnnnnnnnnnnnnnnnnnnnnnnnnnnnnnnnnnnnnnnnnnnnnnnnnnnnnnnnnnnnnnnnnnnnnnnnnnnnnnnnnnnnnnnnnnnnnnnnnnnnnnnnnnnnnnnnnnnnnnnnnnnnnnnnnnnnnnnnnnnnnnnnnnnnnnnnnnnnnnnnnnnnnnnnnnnnnnnnnnnnnnnnnnnnnnnnnnnnnnnnnnnnnnnnnnnnnnnnnnnnnnnnnnnnnnnnnnnnnnnnnnnnnnnnnnnnnnnnnnnnnnnnnnnnnnnnnnnnnnnnnnnnnnnnnnnnnnnnnnnnnnnnnnnnnnnnnnnnnnnnnnnnnnnnnnnnnnnnnnnnnnnnnnnnnnnnnnnnnnnnnnnnnnnnnnnnnnnnnnnnnnnnnnnnnnnnnnnnnnnnnnnnnnnnnnnnnnnnnnnnnnnnnnnnnnnnnnnnnnnnnnnnnnnnnnnnnnnnnnnnnnnnnnnnnnnnnnnnnnnnnnnnnnnnnnnnnnnnnnnnnnnnnnnnnnnnnnnnnnnnnnnnnnnnnnnnnnnnnnnnnnnnnnnnnnnnnnnnnnnnnnnnnnnnnnnnnnnnnnnnnnnnnnnnnnnnnnnnnnnnnnnnnnnnnnnnnnnnnnnnnnnnnnnnnnnnnnnnnnnnnnnnnnnnnnnnnnnnnnnnnnnnnnnnnnnnnnnnnnnnnnnnnnnnnnnnnnnnnnnnnnnnnnnnnnnnnnnnnnnnnnnnnnnnnnnnnnnnnnnnnnnnnnnnnnnnnnnnnnnnnnnnnnnnnnnnnnnnnnnnnnnnnnnnnnnnnnnnnnnnnnnnnnnnnnnnnnnnnnnnnnnnnnnnnnnnnnnnnnnnnnnnnnnnnnnnnnnnnnnnnnnnnnnnnnnnnnnnnnnnnnnnnnnnnnnnnnnnnnnnnnnnnnnnnnnnnnnnnnnnnnnnnnnnnnnnnnnnnnnnnnnnnnnnnnnnnnnnnnnnnnnnnnnnnnnnnnnnnnnnnnnnnnnnnnnnnnnnnnnnnnnnnnnnnnnnnnnnnnnnnnnnnnnnnnnnnnnnnnnnnnnnnnnnnnnnnnnnnnnnnnnnnnnnnnnnnnnnnnnnnnnnnnnnnnnnnnnnnnnnnnnnnnnnnnnnnnnnnnnnnnnnnnnnnnnnnnnnnnnnnnnnnnnnnnnnnnnnnnnnnnnnnnnnnnnnnnnnnnnnnnnnnnnnnnnnnnnnnnnnnnnnnnnnnnnnnnnnnnnnnnnnnnnnnnnnnnnnnnnnnnnnnnnnnnnnnnnnnnnnnnnnnnnnnnnnnnnnnnnnnnnnnnnnnnnnnnnnnnnnnnnnnnnnnnnnnnnnnnnnnnnnnnnnnnnnnnnnnnnnnnnnnnnnnnnnnnnnnnnnnnnnnnnnnnnnnnnnnnnnnnnnnnnnnnnnnnnnnnnnnnnnnnnnnnnnnnnnnnnnnnnnnnnnnnnnnnnnnnnnnnnnnnnnnnnnnnnnnnnnnnnnnnnnnnnnnnnnnnnnnnnnnnnnnnnnnnnnnnnnnnnnnnnnnnnnnnnnnnnnnnnnnnnnnnnnnnnnnnnnnnnnnnnnnnnnnnnnnnnnnnnnnnnnnnnnnnnnnnnnnnnnnnnnnnnnnnnnnnnnnnnnnnnnnnnnnnnnnnnnnnnnnnnnnnnnnnnnnnnnnnnnnnnnnnnnnnnnnnnnnnnnnnnnnnnnnnnnnnnnnnnnnnnnnnnnnnnnnnnnnnnnnnnnnnnnnnnnnnnnnnnnnnnnnnnnnnnnnnnnnnnnnnnnnnnnnnnnnnnnnnnnnnnnnnnnnnnnnnnnnnnnnnnnnnnnnnnnnnnnnnnnnnnnnnnnnnnnnnnnnnnnnnnnnnnnnnnnnnnnnnnnnnnnnnnnnnnnnnnnnnnnnnnnnnnnnnnnnnnnnnnnnnnnnnnnnnnnnnnnnnnnnnnnnnnnnnnnnnnnnnnnnnnnnnnnnnnnnnnnnnnnnnnnnnnnnnnnnnnnnnnnnnnnnnnnnnnnnnnnnnnnnnnnnnnnnnnnnnnnnnnnnnnnnnnnnnnnnnnnnnnnnnnnnnnnnnnnnnnnnnnnnnnnnnnnnnnnnnnnnnnnnnnnnnnnnnnnnnnnnnnnnnnnnnnnnnnnnnnnnnnnnnnnnnnnnnnnnnnnnnnnnnnnnnnnnnnnnnnnnnnnnnnnnnnnnnnnnnnnnnnnnnnnnnnnnnnnnnnnnnnnnnnnnnnnnnnnnnnnnnnnnnnnnnnnnnnnnnnnnnnnnnnnnnnnnnnnnnnnnnnnnnnnnnnnnnnnnnnnnnnnnnnnnnnnnnnnnnnnnnnnnnnnnnnnnnnnnnnnnnnnnnnnnnnnnnnnnnnnnnnnnnnnnnnnnnnnnnnnnnnnnnnnnnnnnnnnnnnnnnnnnnnnnnnnnnnnnnnnnnnnnnnnnnnnnnnnnnnnnnnnnnnnnnnnnnnnnnnnnnnnnnnnnnnnnnnnnnnnnnnnnnnnnnnnnnnnnnnnnnnnnnnnnnnnnnnnnnnnnnnnnnnnnnnnnnnnnnnnnnnnnnnnnnnnnnnnnnnnnnnnnnnnnnnnnnnnnnnnnnnnnnnnnnnnnnnnnnnnnnnnnnnnnnnnnnnnnnnnnnnnnnnnnnnnnnnnnnnnnnnnnnnnnnnnnnnnnnnnnnnnnnnnnnnnnnnnnnnnnnnnnnnnnnnnnnnnnnnnnnnnnnnnnnnnnnnnnnnnnnnnnnnnnnnnnnnnnnnnnnnnnnnnnnnnnnnnnnnnnnnnnnnnnnnnnnnnnnnnnnnnnnnnnnnnnnnnnnnnnnnnnnnnnnnnnnnnnnnnnnnnnnnnnnnnnnnnnnnnnnnnnnnnnnnnnnnnnnnnnnnnnnnnnnnnnnnnnnnnnnnnnnnnnnnnnnnnnnnnnnnnnnnnnnnnnnnnnnnnnnnnnnnnnnnnnnnnnnnnnnnnnnnnnnnnnnnnnnnnnnnnnnnnnnnnnnnnnnnnnnnnnnnnnnnnnnnnnnnnnnnnnnnnnnnnnnnnnnnnnnnnnnnnnnnnnnnnnnnnnnnnnnnnnnnnnnnnnnnnnnnnnnnnnnnnnnnnnnnnnnnnnnnnnnnnnnnnnnnnnnnnnnnnnnnnnnnnnnnnnnnnnnnnnnnnnnnnnnnnnnnnnnnnnnnnnnnnnnnnnnnnnnnnnnnnnnnnnnnnnnnnnnnnnnnnnnnnnnnnnnnnnnnnnnnnnnnnnnnnnnnnnnnnnnnnnnnnnnnnnnnnnnnnnnnnnnnnnnnnnnnnnnnnnnnnnnnnnnnnnnnnnnnnnnnnnnnnnnnnnnnnnnnnnnnnnnnnnnnnnnnnnnnnnnnnnnnnnnnnnnnnnnnnnnnnnnnnnnnnnnnnnnnnnnnnnnnnnnnnnnnnnnnnnnnnnnnnnnnnnnnnnnnnnnnnnnnnnnnnnnnnnnnnnnnnnnnnnnnnnnnnnnnnnnnnnnnnnnnnnnnnnnnnnnnnnnnnnnnnnnnnnnnnnnnnnnnnnnnnnnnnnnnnnnnnnnnnnnnnnnnnnnnnnnnnnnnnnnnnnnnnnnnnnnnnnnnnnnnnnnnnnnnnnnnnnnnnnnnnnnnnnnnnnnnnnnnnnnnnnnnnnnnnnnnnnnnnnnnnnnnnnnnnnnnnnnnnnnnnnnnnnnnnnnnnnnnnnnnnnnnnnnnnnnnnnnnnnnnnnnnnnnnnnnnnnnnnnnnnnnnnnnnnnnnnnnnnnnnnnnnnnnnnnnnnnnnnnnnnnnnnnnnnnnnnnnnnnnnnnnnnnnnnnnnnnnnnnnnnnnnnnnnnnnnnnnnnnnnnnnnnnnnnnnnnnnnnnnnnnnnnnnnnnnnnnnnnnnnnnnnnnnnnnnnnnnnnnnnnnnnnnnnnnnnnnnnnnnnnnnnnnnnnnnnnnnnnnnnnnnnnnnnnnnnnnnnnnnnnnnnnnnnnnnnnnnnnnnnnnnnnnnnnnnnnnnnnnnnnnnnnnnnnnnnnnnnnnnnnnnnnnnnnnnnnnnnnnnnnnnnnnnnnnnnnnnnnnnnnnnnnnnnnnnnnnnnnnnnnnnnnnnnnnnnnnnnnnnnnnnnnnnnnnnnnnnnnnnnnnnnnnnnnnnnnnnnnnnnnnnnnnnnnnnnnnnnnnnnnnnnnnnnnnnnnnnnnnnnnnnnnnnnnnnnnnnnnnnnnnnnnnnnnnnnnnnnnnnnnnnnnnnnnnnnnnnnnnnnnnnnnnnnnnnnnnnnnnnnnnnnnnnnnnnnnnnnnnnnnnnnnnnnnnnnnnnnnnnnnnnnnnnnnnnnnnnnnnnnnnnnnnnnnnnnnnnnnnnnnnnnnnnnnnnnnnnnnnnnnnnnnnnnnnnnnnnnnnnnnnnnnnnnnnnnnnnnnnnnnnnnnnnnnnnnnnnnnnnnnnnnnnnnnnnnnnnnnnnnnnnnnnnnnnnnnnnnnnnnnnnnnnnnnnnnnnnnnnnnnnnnnnnnnnnnnnnnnnnnnnnnnnnnnnnnnnnnnnnnnnnnnnnnnnnnnnnnnnnnnnnnnnnnnnnnnnnnnnnnnnnnnnnnnnnnnnnnnnnnnnnnnnnnnnnnnnnnnnnnnnnnnnnnnnnnnnnnnnnnnnnnnnnnnnnnnnnnnnnnnnnnnnnnnnnnnnnnnnnnnnnnnnnnnnnnnnnnnnnnnnnnnnnnnnnnnnnnnnnnnnnnnnnnnnnnnnnnnnnnnnnnnnnnnnnnnnnnnnnnnnnnnnnnnnnnnnnnnnnnnnnnnnnnnnnnnnnnnnnnnnnnnnnnnnnnnnnnnnnnnnnnnnnnnnnnnnnnnnnnnnnnnnnnnnnnnnnnnnnnnnnnnnnnnnnnnnnnnnnnnnnnnnnnnnnnnnnnnnnnnnnnnnnnnnnnnnnnnnnnnnnnnnnnnnnnnnnnnnnnnnnnnnnnnnnnnnnnnnnnnnnnnnnnnnnnnnnnnnnnnnnnnnnnnnnnnnnnnnnnnnnnnnnnnnnnnnnnnnnnnnnnnnnnnnnnnnnnnnnnnnnnnnnnnnnnnnnnnnnnnnnnnnnnnnnnnnnnnnnnnnnnnnnnnnnnnnnnnnnnnnnnnnnnnnnnnnnnnnnnnnnnnnnnnnnnnnnnnnnnnnnnnnnnnnnnnnnnnnnnnnnnnnnnnnnnnnnnnnnnnnnnnnnnnnnnnnnnnnnnnnnnnnnnnnnnnnnnnnnnnnnnnnnnnnnnnnnnnnnnnnnnnnnnnnnnnnnnnnnnnnnnnnnnnnnnnnnnnnnnnnnnnnnnnnnnnnnnnnnnnnnnnnnnnnnnnnnnnnnnnnnnnnnnnnnnnnnnnnnnnnnnnnnnnnnnnnnnnnnnnnnnnnnnnnnnnnnnnnnnnnnnnnnnnnnnnnnnnnnnnnnnnnnnnnnnnnnnnnnnnnnnnnnnnnnnnnnnnnnnnnnnnnnnnnnnnnnnnnnnnnnnnnnnnnnnnnnnnnnnnnnnnnnnnnnnnnnnnnnnnnnnnnnnnnnnnnnnnnnnnnnnnnnnnnnnnnnnnnnnnnnnnnnnnnnnnnnnnnnnnnnnnnnnnnnnnnnnnnnnnnnnnnnnnnnnnnnnnnnnnnnnnnnnnnnnnnnnnnnnnnnnnnnnnnnnnnnnnnnnnnnnnnnnnnnnnnnnnnnnnnnnnnnnnnnnnnnnnnnnnnnnnnnnnnnnnnnnnnnnnnnnnnnnnnnnnnnnnnnnnnnnnnnnnnnnnnnnnnnnnnnnnnnnnnnnnnnnnnnnnnnnnnnnnnnnnnnnnnnnnnnnnnnnnnnnnnnnnnnnnnnnnnnnnnnnnnnnnnnnnnnnnnnnnnnnnnnnnnnnnnnnnnnnnnnnnnnnnnnnnnnnnnnnnnnnnnnnnnnnnnnnnnnnnnnnnnnnnnnnnnnnnnnnnnnnnnnnnnnnnnnnnnnnnnnnnnnnnnnnnnnnnnnnnnnnnnnnnnnnnnnnnnnnnnnnnnnnnnnnnnnnnnnnnnnnnnnnnnnnnnnnnnnnnnnnnnnnnnnnnnnnnnnnnnnnnnnnnnnnnnnnnnnnnnnnnnnnnnnnnnnnnnnnnnnnnnnnnnnnnnnnnnnnnnnnnnnnnnnnnnnnnnnnnnnnnnnnnnnnnnnnnnnnnnnnnnnnnnnnnnnnnnnnnnnnnnnnnnnnnnnnnnnnnnnnnnnnnnnnnnnnnnnnnnnnnnnnnnnnnnnnnnnnnnnnnnnnnnnnnnnnnnnnnnnnnnnnnnnnnnnnnnnnnnnnnnnnnnnnnnnnnnnnnnnnnnnnnnnnnnnnnnnnnnnnnnnnnnnnnnnnnnnnnnnnnnnnnnnnnnnnnnnnnnnnnnnnnnnnnnnnnnnnnnnnnnnnnnnnnnnnnnnnnnnnnnnnnnnnnnnnnnnnnnnnnnnnnnnnnnnnnnnnnnnnnnnnnnnnnnnnnnnnnnnnnnnnnnnnnnnnnnnnnnnnnnnnnnnnnnnnnnnnnnnnnnnnnnnnnnnnnnnnnnnnnnnnnnnnnnnnnnnnnnnnnnnnnnnnnnnnnnnnnnnnnnnnnnnnnnnnnnnnnnnnnnnnnnnnnnnnnnnnnnnnnnnnnnnnnnnnnnnnnnnnnnnnnnnnnnnnnnnnnnnnnnnnnnnnnnnnnnnnnnnnnnnnnnnnnnnnnnnnnnnnnnnnnnnnnnnnnnnnnnnnnnnnnnnnnnnnnnnnnnnnnnnnnnnnnnnnnnnnnnnnnnnnnnnnnnnnnnnnnnnnnnnnnnnnnnnnnnnnnnnnnnnnnnnnnnnnnnnnnnnnnnnnnnnnnnnnnnnnnnnnnnnnnnnnnnnnnnnnnnnnnnnnnnnnnnnnnnnnnnnnnnnnnnnnnnnnnnnnnnnnnnnnnnnnnnnnnnnnnnnnnnnnnnnnnnnnnnnnnnnnnnnnnnnnnnnnnnnnnnnnnnnnnnnnnnnnnnnnnnnnnnnnnnnnnnnnnnnnnnnnnnnnnnnnnnnnnnnnnnnnnnnnnnnnnnnnnnnnnnnnnnnnnnnnnnnnnnnnnnnnnnnnnnnnnnnnnnnnnnnnnnnnnnnnnnnnnnnnnnnnnnnnnnnnnnnnnnnnnnnnnnnnnnnnnnnnnnnnnnnnnnnnnnnnnnnnnnnnnnnnnnnnnnnnnnnnnnnnnnnnnnnnnnnnnnnnnnnnnnnnnnnnnnnnnnnnnnnnnnnnnnnnnnnnnnnnnnnnnnnnnnnnnnnnnnnnnnnnnnnnnnnnnnnnnnnnnnnnnnnnnnnnnnnnnnnnnnnnnnnnnnnnnnnnnnnnnnnnnnnnnnnnnnnnnnnnnnnnnnnnnnnnnnnnnnnnnnnnnnnnnnnnnnnnnnnnnnnnnnnnnnnnnnnnnnnnnnnnnnnnnnnnnnnnnnnnnnnnnnnnnnnnnnnnnnnnnnnnnnnnnnnnnnnnnnnnnnnnnnnnnnnnnnnnnnnnnnnnnnnnnnnnnnnnnnnnnnnnnnnnnnnnnnnnnnnnnnnnnnnnnnnnnnnnnnnnnnnnnnnnnnnnnnnnnnnnnnnnnnnnnnnnnnnnnnnnnnnnnnnnnnnnnnnnnnnnnnnnnnnnnnnnnnnnnnnnnnnnnnnnnnnnnnnnnnnnnnnnnnnnnnnnnnnnnnnnnnnnnnnnnnnnnnnnnnnnnnnnnnnnnnnnnnnnnnnnnnnnnnnnnnnnnnnnnnnnnnnnnnnnnnnnnnnnnnnnnnnnnnnnnnnnnnnnnnnnnnnnnnnnnnnnnnnnnnnnnnnnnnnnnnnnnnnnnnnnnnnnnnnnnnnnnnnnnnnnnnnnnnnnnnnnnnnnnnnnnnnnnnnnnnnnnnnnnnnnnnnnnnnnnnnnnnnnnnnnnnnnnnnnnnnnnnnnnnnnnnnnnnnnnnnnnnnnnnnnnnnnnnnnnnnnnnnnnnnnnnnnnnnnnnnnnnnnnnnnnnnnnnnnnnnnnnnnnnnnnnnnnnnnnnnnnnnnnnnnnnnnnnnnnnnnnnnnnnnnnnnnnnnnnnnnnnnnnnnnnnnnnnnnnnnnnnnnnnnnnnnnnnnnnnnnnnnnnnnnnnnnnnnnnnnnnnnnnnnnnnnnnnnnnnnnnnnnnnnnnnnnnnnnnnnnnnnnnnnnnnnnnnnnnnnnnnnnnnnnnnnnnnnnnnnnnnnnnnnnnnnnnnnnnnnnnnnnnnnnnnnnnnnnnnnnnnnnnnnnnnnnnnnnnnnnnnnnnnnnnnnnnnnnnnnnnnnnnnnnnnnnnnnnnnnnnnnnnnnnnnnnnnnnnnnnnnnnnnnnnnnnnnnnnnnnnnnnnnnnnnnnnnnnnnnnnnnnnnnnnnnnnnnnnnnnnnnnnnnnnnnnnnnnnnnnnnnnnnnnnnnnnnnnnnnnnnnnnnnnnnnnnnnnnnnnnnnnnnnnnnnnnnnnnnnnnnnnnnnnnnnnnnnnnnnnnnnnnnnnnnnnnnnnnnnnnnnnnnnnnnnnnnnnnnnnnnnnnnnnnnnnnnnnnnnnnnnnnnnnnnnnnnnnnnnnnnnnnnnnnnnnnnnnnnnnnnnnnnnnnnnnnnnnnnnnnnnnnnnnnnnnnnnnnnnnnnnnnnnnnnnnnnnnnnnnnnnnnnnnnnnnnnnnnnnnnnnnnnnnnnnnnnnnnnnnnnnnnnnnnnnnnnnnnnnnnnnnnnnnnnnnnnnnnnnnnnnnnnnnnnnnnnnnnnnnnnnnnnnnnnnnnnnnnnnnnnnnnnnnnnnnnnnnnnnnnnnnnnnnnnnnnnnnnnnnnnnnnnnnnnnnnnnnnnnnnnnnnnnnnnnnnnnnnnnnnnnnnnnnnnnnnnnnnnnnnnnnnnnnnnnnnnnnnnnnnnnnnnnnnnnnnnnnnnnnnnnnnnnnnnnnnnnnnnnnnnnnnnnnnnnnnnnnnnnnnnnnnnnnnnnnnnnnnnnnnnnnnnnnnnnnnnnnnnnnnnnnnnnnnnnnnnnnnnnnnnnnnnnnnnnnnnnnnnnnnnnnnnnnnnnnnnnnnnnnnnnnnnnnnnnnnnnnnnnnnnnnnnnnnnnnnnnnnnnnnnnnnnnnnnnnnnnnnnnnnnnnnnnnnnnnnnnnnnnnnnnnnnnnnnnnnnnnnnnnnnnnnnnnnnnnnnnnnnnnnnnnnnnnnnnnnnnnnnnnnnnnnnnnnnnnnnnnnnnnnnnnnnnnnnnnnnnnnnnnnnnnnnnnnnnnnnnnnnnnnnnnnnnnnnnnnnnnnnnnnnnnnnnnnnnnnnnnnnnnnnnnnnnnnnnnnnnnnnnnnnnnnnnnnnnnnnnnnnnnnnnnnnnnnnnnnnnnnnnnnnnnnnnnnnnnnnnnnnnnnnnnnnnnnnnnnnnnnnnnnnnnnnnnnnnnnnnnnnnnnnnnnnnnnnnnnnnnnnnnnnnnnnnnnnnnnnnnnnnnnnnnnnnnnnnnnnnnnnnnnnnnnnnnnnnnnnnnnnnnnnnnnnnnnnnnnnnnnnnnnnnnnnnnnnnnnnnnnnnnnnnnnnnnnnnnnnnnnnnnnnnnnnnnnnnnnnnnnnnnnnnnnnnnnnnnnnnnnnnnnnnnnnnnnnnnnnnnnnnnnnnnnnnnnnnnnnnnnnnnnnnnnnnnnnnnnnnnnnnnnnnnnnnnnnnnnnnnnnnnnnnnnnnnnnnnnnnnnnnnnnnnnnnnnnnnnnnnnnnnnnnnnnnnnnnnnnnnnnnnnnnnnnnnnnnnnnnnnnnnnnnnnnnnnnnnnnnnnnnnnnnnnnnnnnnnnnnnnnnnnnnnnnnnnnnnnnnnnnnnnnnnnnnnnnnnnnnnnnnnnnnnnnnnnnnnnnnnnnnnnnnnnnnnnnnnnnnnnnnnnnnnnnnnnnnnnnnnnnnnnnnnnnnnnnnnnnnnnnnnnnnnnnnnnnnnnnnnnnnnnnnnnnnnnnnnnnnnnnnnnnnnnnnnnnnnnnnnnnnnnnnnnnnnnnnnnnnnnnnnnnnnnnnnnnnnnnnnnnnnnnnnnnnnnnnnnnnnnnnnnnnnnnnnnnnnnnnnnnnnnnnnnnnnnnnnnnnnnnnnnnnnnnnnnnnnnnnnnnnnnnnnnnnnnnnnnnnnnnnnnnnnnnnnnnnnnnnnnnnnnnnnnnnnnnnnnnnnnnnnnnnnnnnnnnnnnnnnnnnnnnnnnnnnnnnnnnnnnnnnnnnnnnnnnnnnnnnnnnnnnnnnnnnnnnnnnnnnnnnnnnnnnnnnnnnnnnnnnnnnnnnnnnnnnnnnnnnnnnnnnnnnnnnnnnnnnnnnnnnnnnnnnnnnnnnnnnnnnnnnnnnnnnnnnnnnnnnnnnnnnnnnnnnnnnnnnnnnnnnnnnnnnnnnnnnnnnnnnnnnnnnnnnnnnnnnnnnnnnnnnnnnnnnnnnnnnnnnnnnnnnnnnnnnnnnnnnnnnnnnnnnnnnnnnnnnnnnnnnnnnnnnnnnnnnnnnnnnnnnnnnnnnnnnnnnnnnnnnnnnnnnnnnnnnnnnnnnnnnnnnnnnnnnnnnnnnnnnnnnnnnnnnnnnnnnnnnnnnnnnnnnnnnnnnnnnnnnnnnnnnnnnnnnnnnnnnnnnnnnnnnnnnnnnnnnnnnnnnnnnnnnnnnnnnnnnnnnnnnnnnnnnnnnnnnnnnnnnnnnnnnnnnnnnnnnnnnnnnnnnnnnnnnnnnnnnnnnnnnnnnnnnnnnnnnnnnnnnnnnnnnnnnnnnnnnnnnnnnnnnnnnnnnnnnnnnnnnnnnnnnnnnnnnnnnnnnnnnnnnnnnnnnnnnnnnnnnnnnnnnnnnnnnnnnnnnnnnnnnnnnnnnnnnnnnnnnnnnnnnnnnnnnnnnnnnnnnnnnnnnnnnnnnnnnnnnnnnnnnnnnnnnnnnnnnnnnnnnnnnnnnnnnnnnnnnnnnnnnnnnnnnnnnnnnnnnnnnnnnnnnnnnnnnnnnnnnnnnnnnnnnnnnnnnnnnnnnnnnnnnnnnnnnnnnnnnnnnnnnnnnnnnnnnnnnnnnnnnnnnnnnnnnnnnnnnnnnnnnnnnnnnnnnnnnnnnnnnnnnnnnnnnnnnnnnnnnnnnnnnnnnnnnnnnnnnnnnnnnnnnnnnnnnnnnnnnnnnnnnnnnnnnnnnnnnnnnnnnnnnnnnnnnnnnnnnnnnnnnnnnnnnnnnnnnnnnnnnnnnnnnnnnnnnnnnnnnnnnnnnnnnnnnnnnnnnnnnnnnnnnnnnnnnnnnnnnnnnnnnnnnnnnnnnnnnnnnnnnnnnnnnnnnnnnnnnnnnnnnnnnnnnnnnnnnnnnnnnnnnnnnnnnnnnnnnnnnnnnnnnnnnnnnnnnnnnnnnnnnnnnnnnnnnnnnnnnnnnnnnnnnnnnnnnnnnnnnnnnnnnnnnnnnnnnnnnnnnnnnnnnnnnnnnnnnnnnnnnnnnnnnnnnnnnnnnnnnnnnnnnnnnnnnnnnnnnnnnnnnnnnnnnnnnnnnnnnnnnnnnnnnnnnnnnnnnnnnnnnnnnnnnnnnnnnnnnnnnnnnnnnnnnnnnnnnnnnnnnnnnnnnnnnnnnnnnnnnnnnnnnnnnnnnnnnnnnnnnnnnnnnnnnnnnnnnnnnnnnnnnnnnnnnnnnnnnnnnnnnnnnnnnnnnnnnnnnnnnnnnnnnnnnnnnnnnnnnnnnnnnnnnnnnnnnnnnnnnnnnnnnnnnnnnnnnnnnnnnnnnnnnnnnnnnnnnnnnnnnnnnnnnnnnnnnnnnnnnnnnnnnnnnnnnnnnnnnnnnnnnnnnnnnnnnnnnnnnnnnnnnnnnnnnnnnnnnnnnnnnnnnnnnnnnnnnnnnnnnnnnnnnnnnnnnnnnnnnnnnnnnnnnnnnnnnnnnnnnnnnnnnnnnnnnnnnnnnnnnnnnnnnnnnnnnnnnnnnnnnnnnnnnnnnnnnnnnnnnnnnnnnnnnnnnnnnnnnnnnnnnnnnnnnnnnnnnnnnnnnnnnnnnnnnnnnnnnnnnnnnnnnnnnnnnnnnnnnnnnnnnnnnnnnnnnnnnnnnnnnnnnnnnnnnnnnnnnnnnnnnnnnnnnnnnnnnnnnnnnnnnnnnnnnnnnnnnnnnnnnnnnnnnnnnnnnnnnnnnnnnnnnnnnnnnnnnnnnnnnnnnnnnnnnnnnnnnnnnnnnnnnnnnnnnnnnnnnnnnnnnnnnnnnnnnnnnnnnnnnnnnnnnnnnnnnnnnnnnnnnnnnnnnnnnnnnnnnnnnnnnnnnnnnnnnnnnnnnnnnnnnnnnnnnnnnnnnnnnnnnnnnnnnnnnnnnnnnnnnnnnnnnnnnnnnnnnnnnnnnnnnnnnnnnnnnnnnnnnnnnnnnnnnnnnnnnnnnnnnnnnnnnnnnnnnnnnnnnnnnnnnnnnnnnnnnnnnnnnnnnnnnnnnnnnnnnnnnnnnnnnnnnnnnnnnnnnnnnnnnnnnnnnnnnnnnnnnnnnnnnnnnnnnnnnnnnnnnnnnnnnnnnnnnnnnnnnnnnnnnnnnnnnnnnnnnnnnnnnnnnnnnnnnnnnnnnnnnnnnnnnnnnnnnnnnnnnnnnnnnnnnnnnnnnnnnnnnnnnnnnnnnnnnnnnnnnnnnnnnnnnnnnnnnnnnnnnnnnnnnnnnnnnnnnnnnnnnnnnnnnnnnnnnnnnnnnnnnnnnnnnnnnnnnnnnnnnnnnnnnnnnnnnnnnnnnnnnnnnnnnnnnnnnnnnnnnnnnnnnnnnnnnnnnnnnnnnnnnnnnnnnnnnnnnnnnnnnnnnnnnnnnnnnnnnnnnnnnnnnnnnnnnnnnnnnnnnnnnnnnnnnnnnnnnnnnnnnnnnnnnnnnnnnnnnnnnnnnnnnnnnnnnnnnnnnnnnnnnnnnnnnnnnnnnnnnnnnnnnnnnnnnnnnnnnnnnnnnnnnnnnnnnnnnnnnnnnnnnnnnnnnnnnnnnnnnnnnnnnnnnnnnnnnnnnnnnnnnnnnnnnnnnnnnnnnnnnnnnnnnnnnnnnnnnnnnnnnnnnnnnnnnnnnnnnnnnnnnnnnnnnnnnnnnnnnnnnnnnnnnnnnnnnnnnnnnnnnnnnnnnnnnnnnnnnnnnnnnnnnnnnnnnnnnnnnnnnnnnnnnnnnnnnnnnnnnnnnnnnnnnnnnnnnnnnnnnnnnnnnnnnnnnnnnnnnnnnnnnnnnnnnnnnnnnnnnnnnnnnnnnnnnnnnnnnnnnnnnnnnnnnnnnnnnnnnnnnnnnnnnnnnnnnnnnnnnnnnnnnnnnnnnnnnnnnnnnnnnnnnnnnnnnnnnnnnnnnnnnnnnnnnnnnnnnnnnnnnnnnnnnnnnnnnnnnnnnnnnnnnnnnnnnnnnnnnnnnnnnnnnnnnnnnnnnnnnnnnnnnnnnnnnnnnnnnnnnnnnnnnnnnnnnnnnnnnnnnnnnnnnnnnnnnnnnnnnnnnnnnnnnnnnnnnnnnnnnnnnnnnnnnnnnnnnnnnnnnnnnnnnnnnnnnnnnnnnnnnnnnnnnnnnnnnnnnnnnnnnnnnnnnnnnnnnnnnnnnnnnnnnnnnnnnnnnnnnnnnnnnnnnnnnnnnnnnnnnnnnnnnnnnnnnnnnnnnnnnnnnnnnnnnnnnnnnnnnnnnnnnnnnnnnnnnnnnnnnnnnnnnnnnnnnnnnnnnnnnnnnnnnnnnnnnnnnnnnnnnnnnnnnnnnnnnnnnnnnnnnnnnnnnnnnnnnnnnnnnnnnnnnnnnnnnnnnnnnnnnnnnnnnnnnnnnnnnnnnnnnnnnnnnnnnnnnnnnnnnnnnnnnnnnnnnnnnnnnnnnnnnnnnnnnnnnnnnnnnnnnnnnnnnnnnnnnnnnnnnnnnnnnnnnnnnnnnnnnnnnnnnnnnnnnnnnnnnnnnnnnnnnnnnnnnnnnnnnnnnnnnnnnnnnnnnnnnnnnnnnnnnnnnnnnnnnnnnnnnnnnnnnnnnnnnnnnnnnnnnnnnnnnnnnnnnnnnnnnnnnnnnnnnnnnnnnnnnnnnnnnnnnnnnnnnnnnnnnnnnnnnnnnnnnnnnnnnnnnnnnnnnnnnnnnnnnnnnnnnnnnnnnnnnnnnnnnnnnnnnnnnnnnnnnnnnnnnnnnnnnnnnnnnnnnnnnnnnnnnnnnnnnnnnnnnnnnnnnnnnnnnnnnnnnnnnnnnnnnnnnnnnnnnnnnnnnnnnnnnnnnnnnnnnnnnnnnnnnnnnnnnnnnnnnnnnnnnnnnnnnnnnnnnnnnnnnnnnnnnnnnnnnnnnnnnnnnnnnnnnnnnnnnnnnnnnnnnnnnnnnnnnnnnnnnnnnnnnnnnnnnnnnnnnnnnnnnnnnnnnnnnnnnnnnnnnnnnnnnnnnnnnnnnnnnnnnnnnnnnnnnnnnnnnnnnnnnnnnnnnnnnnnnnnnnnnnnnnnnnnnnnnnnnnnnnnnnnnnnnnnnnnnnnnnnnnnnnnnnnnnnnnnnnnnnnnnnnnnnnnnnnnnnnnnnnnnnnnnnnnnnnnnnnnnnnnnnnnnnnnnnnnnnnnnnnnnnnnnnnnnnnnnnnnnnnnnnnnnnnnnnnnnnnnnnnnnnnnnnnnnnnnnnnnnnnnnnnnnnnnnnnnnnnnnnnnnnnnnnnnnnnnnnnnnnnnnnnnnnnnnnnnnnnnnnnnnnnnnnnnnnnnnnnnnnnnnnnnnnnnnnnnnnnnnnnnnnnnnnnnnnnnnnnnnnnnnnnnnnnnnnnnnnnnnnnnnnnnnnnnnnnnnnnnnnnnnnnnnnnnnnnnnnnnnnnnnnnnnnnnnnnnnnnnnnnnnnnnnnnnnnnnnnnnnnnnnnnnnnnnnnnnnnnnnnnnnnnnnnnnnnnnnnnnnnnnnnnnnnnnnnnnnnnnnnnnnnnnnnnnnnnnnnnnnnnnnnnnnnnnnnnnnnnnnnnnnnnnnnnnnnnnnnnnnnnnnnnnnnnnnnnnnnnnnnnnnnnnnnnnnnnnnnnnnnnnnnnnnnnnnnnnnnnnnnnnnnnnnnnnnnnnnnnnnnnnnnnnnnnnnnnnnnnnnnnnnnnnnnnnnnnnnnnnnnnnnnnnnnnnnnnnnnnnnnnnnnnnnnnnnnnnnnnnnnnnnnnnnnnnnnnnnnnnnnnnnnnnnnnnnnnnnnnnnnnnnnnnnnnnnnnnnnnnnnnnnnnnnnnnnnnnnnnnnnnnnnnnnnnnnnnnnnnnnnnnnnnnnnnnnnnnnnnnnnnnnnnnnnnnnnnnnnnnnnnnnnnnnnnnnnnnnnnnnnnnnnnnnnnnnnnnnnnnnnnnnnnnnnnnnnnnnnnnnnnnnnnnnnnnnnnnnnnnnnnnnnnnnnnnnnnnnnnnnnnnnnnnnnnnnnnnnnnnnnnnnnnnnnnnnnnnnnnnnnnnnnnnnnnnnnnnnnnnnnnnnnnnnnnnnnnnnnnnnnnnnnnnnnnnnnnnnnnnnnnnnnnnnnnnnnnnnnnnnnnnnnnnnnnnnnnnnnnnnnnnnnnnnnnnnnnnnnnnnnnnnnnnnnnnnnnnnnnnnnnnnnnnnnnnnnnnnnnnnnnnnnnnnnnnnnnnnnnnnnnnnnnnnnnnnnnnnnnnnnnnnnnnnnnnnnnnnnnnnnnnnnnnnnnnnnnnnnnnnnnnnnnnnnnnnnnnnnnnnnnnnnnnnnnnnnnnnnnnnnnnnnnnnnnnnnnnnnnnnnnnnnnnnnnnnnnnnnnnnnnnnnnnnnnnnnnnnnnnnnnnnnnnnnnnnnnnnnnnnnnnnnnnnnnnnnnnnnnnnnnnnnnnnnnnnnnnnnnnnnnnnnnnnnnnnnnnnnnnnnnnnnnnnnnnnnnnnnnnnnnnnnnnnnnnnnnnnnnnnnnnnnnnnnnnnnnnnnnnnnnnnnnnnnnnnnnnnnnnnnnnnnnnnnnnnnnnnnnnnnnnnnnnnnnnnnnnnnnnnnnnnnnnnnnnnnnnnnnnnnnnnnnnnnnnnnnnnnnnnnnnnnnnnnnnnnnnnnnnnnnnnnnnnnnnnnnnnnnnnnnnnnnnnnnnnnnnnnnnnnnnnnnnnnnnnnnnnnnnnnnnnnnnnnnnnnnnnnnnnnnnnnnnnnnnnnnnnnnnnnnnnnnnnnnnnnnnnnnnnnnnnnnnnnnnnnnnnnnnnnnnnnnnnnnnnnnnnnnnnnnnnnnnnnnnnnnnnnnnnnnnnnnnnnnnnnnnnnnnnnnnnnnnnnnnnnnnnnnnnnnnnnnnnnnnnnnnnnnnnnnnnnnnnnnnnnnnnnnnnnnnnnnnnnnnnnnnnnnnnnnnnnnnnnnnnnnnnnnnnnnnnnnnnnnnnnnnnnnnnnnnnnnnnnnnnnnnnnnnnnnnnnnnnnnnnnnnnnnnnnnnnnnnnnnnnnnnnnnnnnnnnnnnnnnnnnnnnnnnnnnnnnnnnnnnnnnnnnnnnnnnnnnnnnnnnnnnnnnnnnnnnnnnnnnnnnnnnnnnnnnnnnnnnnnnnnnnnnnnnnnnnnnnnnnnnnnnnnnnnnnnnnnnnnnnnnnnnnnnnnnnnnnnnnnnnnnnnnnnnnnnnnnnnnnnnnnnnnnnnnnnnnnnnnnnnnnnnnnnnnnnnnnnnnnnnnnnnnnnnnnnnnnnnnnnnnnnnnnnnnnnnnnnnnnnnnnnnnnnnnnnnnnnnnnnnnnnnnnnnnnnnnnnnnnnnnnnnnnnnnnnnnnnnnnnnnnnnnnnnnnnnnnnnnnnnnnnnnnnnnnnnnnnnnnnnnnnnnnnnnnnnnnnnnnnnnnnnnnnnnnnnnnnnnnnnnnnnnnnnnnnnnnnnnnnnnnnnnnnnnnnnnnnnnnnnnnnnnnnnnnnnnnnnnnnnnnnnnnnnnnnnnnnnnnnnnnnnnnnnnnnnnnnnnnnnnnnnnnnnnnnnnnnnnnnnnnnnnnnnnnnnnnnnnnnnnnnnnnnnnnnnnnnnnnnnnnnnnnnnnnnnnnnnnnnnnnnnnnnnnnnnnnnnnnnnnnnnnnnnnnnnnnnnnnnnnnnnnnnnnnnnnnnnnnnnnnnnnnnnnnnnnnnnnnnnnnnnnnnnnnnnnnnnnnnnnnnnnnnnnnnnnnnnnnnnnnnnnnnnnnnnnnnnnnnnnnnnnnnnnnnnnnnnnnnnnnnnnnnnnnnnnnnnnnnnnnnnnnnnnnnnnnnnnnnnnnnnnnnnnnnnnnnnnnnnnnnnnnnnnnnnnnnnnnnnnnnnnnnnnnnnnnnnnnnnnnnnnnnnnnnnnnnnnnnnnnnnnnnnnnnnnnnnnnnnnnnnnnnnnnnnnnnnnnnnnnnnnnnnnnnnnnnnnnnnnnnnnnnnnnnnnnnnnnnnnnnnnnnnnnnnnnnnnnnnnnnnnnnnnnnnnnnnnnnnnnnnnnnnnnnnnnnnnnnnnnnnnnnnnnnnnnnnnnnnnnnnnnnnnnnnnnnnnnnnnnnnnnnnnnnnnnnnnnnnnnnnnnnnnnnnnnnnnnnnnnnnnnnnnnnnnnnnnnnnnnnnnnnnnnnnnnnnnnnnnnnnnnnnnnnnnnnnnnnnnnnnnnnnnnnnnnnnnnnnnnnnnnnnnnnnnnnnnnnnnnnnnnnnnnnnnnnnnnnnnnnnnnnnnnnnnnnnnnnnnnnnnnnnnnnnnnnnnnnnnnnnnnnnnnnnnnnnnnnnnnnnnnnnnnnnnnnnnnnnnnnnnnnnnnnnnnnnnnnnnnnnnnnnnnnnnnnnnnnnnnnnnnnnnnnnnnnnnnnnnnnnnnnnnnnnnnnnnnnnnnnnnnnnnnnnnnnnnnnnnnnnnnnnnnnnnnnnnnnnnnnnnnnnnnnnnnnnnnnnnnnnnnnnnnnnnnnnnnnnnnnnnnnnnnnnnnnnnnnnnnnnnnnnnnnnnnnnnnnnnnnnnnnnnnnnnnnnnnnnnnnnnnnnnnnnnnnnnnnnnnnnnnnnnnnnnnnnnnnnnnnnnnnnnnnnnnnnnnnnnnnnnnnnnnnnnnnnnnnnnnnnnnnnnnnnnnnnnnnnnnnnnnnnnnnnnnnnnnnnnnnnnnnnnnnnnnnnnnnnnnnnnnnnnnnnnnnnnnnnnnnnnnnnnnnnnnnnnnnnnnnnnnnnnnnnnnnnnnnnnnnnnnnnnnnnnnnnnnnnnnnnnnnnnnnnnnnnnnnnnnnnnnnnnnnnnnnnnnnnnnnnnnnnnnnnnnnnnnnnnnnnnnnnnnnnnnnnnnnnnnnnnnnnnnnnnnnnnnnnnnnnnnnnnnnnnnnnnnnnnnnnnnnnnnnnnnnnnnnnnnnnnnnnnnnnnnnnnnnnnnnnnnnnnnnnnnnnnnnnnnnnnnnnnnnnnnnnnnnnnnnnnnnnnnnnnnnnnnnnnnnnnnnnnnnnnnnnnnnnnnnnnnnnnnnnnnnnnnnnnnnnnnnnnnnnnnnnnnnnnnnnnnnnnnnnnnnnnnnnnnnnnnnnnnnnnnnnnnnnnnnnnnnnnnnnnnnnnnnnnnnnnnnnnnnnnnnnnnnnnnnnnnnnnnnnnnnnnnnnnnnnnnnnnnnnnnnnnnnnnnnnnnnnnnnnnnnnnnnnnnnnnnnnnnnnnnnnnnnnnnnnnnnnnnnnnnnnnnnnnnnnnnnnnnnnnnnnnnnnnnnnnnnnnnnnnnnnnnnnnnnnnnnnnnnnnnnnnnnnnnnnnnnnnnnnnnnnnnnnnnnnnnnnnnnnnnnnnnnnnnnnnnnnnnnnnnnnnnnnnnnnnnnnnnnnnnnnnnnnnnnnnnnnnnnnnnnnnnnnnnnnnnnnnnnnnnnnnnnnnnnnnnnnnnnnnnnnnnnnnnnnnnnnnnnnnnnnnnnnnnnnnnnnnnnnnnnnnnnnnnnnnnnnnnnnnnnnnnnnnnnnnnnnnnnnnnnnnnnnnnnnnnnnnnnnnnnnnnnnnnnnnnnnnnnnnnnnnnnnnnnnnnnnnnnnnnnnnnnnnnnnnnnnnnnnnnnnnnnnnnnnnnnnnnnnnnnnnnnnnnnnnnnnnnnnnnnnnnnnnnnnnnnnnnnnnnnnnnnnnnnnnnnnnnnnnnnnnnnnnnnnnnnnnnnnnnnnnnnnnnnnnnnnnnnnnnnnnnnnnnnnnnnnnnnnnnnnnnnnnnnnnnnnnnnnnnnnnnnnnnnnnnnnnnnnnnnnnnnnnnnnnnnnnnnnnnnnnnnnnnnnnnnnnnnnnnnnnnnnnnnnnnnnnnnnnnnnnnnnnnnnnnnnnnnnnnnnnnnnnnnnnnnnnnnnnnnnnnnnnnnnnnnnnnnnnnnnnnnnnnnnnnnnnnnnnnnnnnnnnnnnnnnnnnnnnnnnnnnnnnnnnnnnnnnnnnnnnnnnnnnnnnnnnnnnnnnnnnnnnnnnnnnnnnnnnnnnnnnnnnnnnnnnnnnnnnnnnnnnnnnnnnnnnnnnnnnnnnnnnnnnnnnnnnnnnnnnnnnnnnnnnnnnnnnnnnnnnnnnnnnnnnnnnnnnnnnnnnnnnnnnnnnnnnnnnnnnnnnnnnnnnnnnnnnnnnnnnnnnnnnnnnnnnnnnnnnnnnnnnnnnnnnnnnnnnnnnnnnnnnnnnnnnnnnnnnnnnnnnnnnnnnnnnnnnnnnnnnnnnnnnnnnnnnnnnnnnnnnnnnnnnnnnnnnnnnnnnnnnnnnnnnnnnnnnnnnnnnnnnnnnnnnnnnnnnnnnnnnnnnnnnnnnnnnnnnnnnnnnnnnnnnnnnnnnnnnnnnnnnnnnnnnnnnnnnnnnnnnnnnnnnnnnnnnnnnnnnnnnnnnnnnnnnnnnnnnnnnnnnnnnnnnnnnnnnnnnnnnnnnnnnnnnnnnnnnnnnnnnnnnnnnnnnnnnnnnnnnnnnnnnnnnnnnnnnnnnnnnnnnnnnnnnnnnnnnnnnnnnnnnnnnnnnnnnnnnnnnnnnnnnnnnnnnnnnnnnnnnnnnnnnnnnnnnnnnnnnnnnnnnnnnnnnnnnnnnnnnnnnnnnnnnnnnnnnnnnnnnnnnnnnnnnnnnnnnnnnnnnnnnnnnnnnnnnnnnnnnnnnnnnnnnnnnnnnnnnnnnnnnnnnnnnnnnnnnnnnnnnnnnnnnnnnnnnnnnnnnnnnnnnnnnnnnnnnnnnnnnnnnnnnnnnnnnnnnnnnnnnnnnnnnnnnnnnnnnnnnnnnnnnnnnnnnnnnnnnnnnnnnnnnnnnnnnnnnnnnnnnnnnnnnnnnnnnnnnnnnnnnnnnnnnnnnnnnnnnnnnnnnnnnnnnnnnnnnnnnnnnnnnnnnnnnnnnnnnnnnnnnnnnnnnnnnnnnnnnnnnnnnnnnnnnnnnnnnnnnnnnnnnnnnnnnnnnnnnnnnnnnnnnnnnnnnnnnnnnnnnnnnnnnnnnnnnnnnnnnnnnnnnnnnnnnnnnnnnnnnnnnnnnnnnnnnnnnnnnnnnnnnnnnnnnnnnnnnnnnnnnnnnnnnnnnnnnnnnnnnnnnnnnnnnnnnnnnnnnnnnnnnnnnnnnnnnnnnnnnnnnnnnnnnnnnnnnnnnnnnnnnnnnnnnnnnnnnnnnnnnnnnnnnnnnnnnnnnnnnnnnnnnnnnnnnnnnnnnnnnnnnnnnnnnnnnnnnnnnnnnnnnnnnnnnnnnnnnnnnnnnnnnnnnnnnnnnnnnnnnnnnnnnnnnnnnnnnnnnnnnnnnnnnnnnnnnnnnnnnnnnnnnnnnnnnnnnnnnnnnnnnnnnnnnnnnnnnnnnnnnnnnnnnnnnnnnnnnnnnnnnnnnnnnnnnnnnnnnnnnnnnnnnnnnnnnnnnnnnnnnnnnnnnnnnnnnnnnnnnnnnnnnnnnnnnnnnnnnnnnnnnnnnnnnnnnnnnnnnnnnnnnnnnnnnnnnnnnnnnnnnnnnnnnnnnnnnnnnnnnnnnnnnnnnnnnnnnnnnnnnnnnnnnnnnnnnnnnnnnnnnnnnnnnnnnnnnnnnnnnnnnnnnnnnnnnnnnnnnnnnnnnnnnnnnnnnnnnnnnnnnnnnnnnnnnnnnnnnnnnnnnnnnnnnnnnnnnnnnnnnnnnnnnnnnnnnnnnnnnnnnnnnnnnnnnnnnnnnnnnnnnnnnnnnnnnnnnnnnnnnnnnnnnnnnnnnnnnnnnnnnnnnnnnnnnnnnnnnnnnnnnnnnnnnnnnnnnnnnnnnnnnnnnnnnnnnnnnnnnnnnnnnnnnnnnnnnnnnnnnnnnnnnnnnnnnnnnnnnnnnnnnnnnnnnnnnnnnnnnnnnnnnnnnnnnnnnnnnnnnnnnnnnnnnnnnnnnnnnnnnnnnnnnnnnnnnnnnnnnnnnnnnnnnnnnnnnnnnnnnnnnnnnnnnnnnnnnnnnnnnnnnnnnnnnnnnnnnnnnnnnnnnnnnnnnnnnnnnnnnnnnnnnnnnnnnnnnnnnnnnnnnnnnnnnnnnnnnnnnnnnnnnnnnnnnnnnnnnnnnnnnnnnnnnnnnnnnnnnnnnnnnnnnnnnnnnnnnnnnnnnnnnnnnnnnnnnnnnnnnnnnnnnnnnnnnnnnnnnnnnnnnnnnnnnnnnnnnnnnnnnnnnnnnnnnnnnnnnnnnnnnnnnnnnnnnnnnnnnnnnnnnnnnnnnnnnnnnnnnnnnnnnnnnnnnnnnnnnnnnnnnnnnnnnnnnnnnnnnnnnnnnnnnnnnnnnnnnnnnnnnnnnnnnnnnnnnnnnnnnnnnnnnnnnnnnnnnnnnnnnnnnnnnnnnnnnnnnnnnnnnnnnnnnnnnnnnnnnnnnnnnnnnnnnnnnnnnnnnnnnnnnnnnnnnnnnnnnnnnnnnnnnnnnnnnnnnnnnnnnnnnnnnnnnnnnnnnnnnnnnnnnnnnnnnnnnnnnnnnnnnnnnnnnnnnnnnnnnnnnnnnnnnnnnnnnnnnnnnnnnnnnnnnnnnnnnnnnnnnnnnnnnnnnnnnnnnnnnnnnnnnnnnnnnnnnnnnnnnnnnnnnnnnnnnnnnnnnnnnnnnnnnnnnnnnnnnnnnnnnnnnnnnnnnnnnnnnnnnnnnnnnnnnnnnnnnnnnnnnnnnnnnnnnnnnnnnnnnnnnnnnnnnnnnnnnnnnnnnnnnnnnnnnnnnnnnnnnnnnnnnnnnnnnnnnnnnnnnnnnnnnnnnnnnnnnnnnnnnnnnnnnnnnnnnnnnnnnnnnnnnnnnnnnnnnnnnnnnnnnnnnnnnnnnnnnnnnnnnnnnnnnnnnnnnnnnnnnnnnnnnnnnnnnnnnnnnnnnnnnnnnnnnnnnnnnnnnnnnnnnnnnnnnnnnnnnnnnnnnnnnnnnnnnnnnnnnnnnnnnnnnnnnnnnnnnnnnnnnnnnnnnnnnnnnnnnnnnnnnnnnnnnnnnnnnnnnnnnnnnnnnnnnnnnnnnnnnnnnnnnnnnnnnnnnnnnnnnnnnnnnnnnnnnnnnnnnnnnnnnnnnnnnnnnnnnnnnnnnnnnnnnnnnnnnnnnnnnnnnnnnnnnnnnnnnnnnnnnnnnnnnnnnnnnnnnnnnnnnnnnnnnnnnnnnnnnnnnnnnnnnnnnnnnnnnnnnnnnnnnnnnnnnnnnnnnnnnnnnnnnnnnnnnnnnnnnnnnnnnnnnnnnnnnnnnnnnnnnnnnnnnnnnnnnnnnnnnnnnnnnnnnnnnnnnnnnnnnnnnnnnnnnnnnnnnnnnnnnnnnnnnnnnnnnnnnnnnnnnnnnnnnnnnnnnnnnnnnnnnnnnnnnnnnnnnnnnnnnnnnnnnnnnnnnnnnnnnnnnnnnnnnnnnnnnnnnnnnnnnnnnnnnnnnnnnnnnnnnnnnnnnnnnnnnnnnnnnnnnnnnnnnnnnnnnnnnnnnnnnnnnnnnnnnnnnnnnnnnnnnnnnnnnnnnnnnnnnnnnnnnnnnnnnnnnnnnnnnnnnnnnnnnnnnnnnnnnnnnnnnnnnnnnnnnnnnnnnnnnnnnnnnnnnnnnnnnnnnnnnnnnnnnnnnnnnnnnnnnnnnnnnnnnnnnnnnnnnnnnnnnnnnnnnnnnnnnnnnnnnnnnnnnnnnnnnnnnnnnnnnnnnnnnnnnnnnnnnnnnnnnnnnnnnnnnnnnnnnnnnnnnnnnnnnnnnnnnnnnnnnnnnnnnnnnnnnnnnnnnnnnnnnnnnnnnnnnnnnnnnnnnnnnnnnnnnnnnnnnnnnnnnnnnnnnnnnnnnnnnnnnnnnnnnnnnnnnnnnnnnnnnnnnnnnnnnnnnnnnnnnnnnnnnnnnnnnnnnnnnnnnnnnnnnnnnnnnnnnnnnnnnnnnnnnnnnnnnnnnnnnnnnnnnnnnnnnnnnnnnnnnnnnnnnnnnnnnnnnnnnnnnnnnnnnnnnnnnnnnnnnnnnnnnnnnnnnnnnnnnnnnnnnnnnnnnnnnnnnnnnnnnnnnnnnnnnnnnnnnnnnnnnnnnnnnnnnnnnnnnnnnnnnnnnnnnnnnnnnnnnnnnnnnnnnnnnnnnnnnnnnnnnnnnnnnnnnnnnnnnnnnnnnnnnnnnnnnnnnnnnnnnnnnnnnnnnnnnnnnnnnnnnnnnnnnnnnnnnnnnnnnnnnnnnnnnnnnnnnnnnnnnnnnnnnnnnnnnnnnnnnnnnnnnnnnnnnnnnnnnnnnnnnnnnnnnnnnnnnnnnnnnnnnnnnnnnnnnnnnnnnnnnnnnnnnnnnnnnnnnnnnnnnnnnnnnnnnnnnnnnnnnnnnnnnnnnnnnnnnnnnnnnnnnnnnnnnnnnnnnnnnnnnnnnnnnnnnnnnnnnnnnnnnnnnnnnnnnnnnnnnnnnnnnnnnnnnnnnnnnnnnnnnnnnnnnnnnnnnnnnnnnnnnnnnnnnnnnnnnnnnnnnnnnnnnnnnnnnnnnnnnnnnnnnnnnnnnnnnnnnnnnnnnnnnnnnnnnnnnnnnnnnnnnnnnnnnnnnnnnnnnnnnnnnnnnnnnnnnnnnnnnnnnnnnnnnnnnnnnnnnnnnnnnnnnnnnnnnnnnnnnnnnnnnnnnnnnnnnnnnnnnnnnnnnnnnnnnnnnnnnnnnnnnnnnnnnnnnnnnnnnnnnnnnnnnnnnnnnnnnnnnnnnnnnnnnnnnnnnnnnnnnnnnnnnnnnnnnnnnnnnnnnnnnnnnnnnnnnnnnnnnnnnnnnnnnnnnnnnnnnnnnnnnnnnnnnnnnnnnnnnnnnnnnnnnnnnnnnnnnnnnnnnnnnnnnnnnnnnnnnnnnnnnnnnnnnnnnnnnnnnnnnnnnnnnnnnnnnnnnnnnnnnnnnnnnnnnnnnnnnnnnnnnnnnnnnnnnnnnnnnnnnnnnnnnnnnnnnnnnnnnnnnnnnnnnnnnnnnnnnnnnnnnnnnnnnnnnnnnnnnnnnnnnnnnnnnnnnnnnnnnnnnnnnnnnnnnnnnnnnnnnnnnnnnnnnnnnnnnnnnnnnnnnnnnnnnnnnnnnnnnnnnnnnnnnnnnnnnnnnnnnnnnnnnnnnnnnnnnnnnnnnnnnnnnnnnnnnnnnnnnnnnnnnnnnnnnnnnnnnnnnnnnnnnnnnnnnnnnnnnnnnnnnnnnnnnnnnnnnnnnnnnnnnnnnnnnnnnnnnnnnnnnnnnnnnnnnnnnnnnnnnnnnnnnnnnnnnnnnnnnnnnnnnnnnnnnnnnnnnnnnnnnnnnnnnnnnnnnnnnnnnnnnnnnnnnnnnnnnnnnnnnnnnnnnnnnnnnnnnnnnnnnnnnnnnnnnnnnnnnnnnnnnnnnnnnnnnnnnnnnnnnnnnnnnnnnnnnnnnnnnnnnnnnnnnnnnnnnnnnnnnnnnnnnnnnnnnnnnnnnnnnnnnnnnnnnnnnnnnnnnnnnnnnnnnnnnnnnnnnnnnnnnnnnnnnnnnnnnnnnnnnnnnnnnnnnnnnnnnnnnnnnnnnnnnnnnnnnnnnnnnnnnnnnnnnnnnnnnnnnnnnnnnnnnnnnnnnnnnnnnnnnnnnnnnnnnnnnnnnnnnnnnnnnnnnnnnnnnnnnnnnnnnnnnnnnnnnnnnnnnnnnnnnnnnnnnnnnnnnnnnnnnnnnnnnnnnnnnnnnnnnnnnnnnnnnnnnnnnnnnnnnnnnnnnnnnnnnnnnnnnnnnnnnnnnnnnnnnnnnnnnnnnnnnnnnnnnnnnnnnnnnnnnnnnnnnnnnnnnnnnnnnnnnnnnnnnnnnnnnnnnnnnnnnnnnnnnnnnnnnnnnnnnnnnnnnnnnnnnnnnnnnnnnnnnnnnnnnnnnnnnnnnnnnnnnnnnnnnnnnnnnnnnnnnnnnnnnnnnnnnnnnnnnnnnnnnnnnnnnnnnnnnnnnnnnnnnnnnnnnnnnnnnnnnnnnnnnnnnnnnnnnnnnnnnnnnnnnnnnnnnnnnnnnnnnnnnnnnnnnnnnnnnnnnnnnnnnnnnnnnnnnnnnnnnnnnnnnnnnnnnnnnnnnnnnnnnnnnnnnnnnnnnnnnnnnnnnnnnnnnnnnnnnnnnnnnnnnnnnnnnnnnnnnnnnnnnnnnnnnnnnnnnnnnnnnnnnnnnnnnnnnnnnnnnnnnnnnnnnnnnnnnnnnnnnnnnnnnnnnnnnnnnnnnnnnnnnnnnnnnnnnnnnnnnnnnnnnnnnnnnnnnnnnnnnnnnnnnnnnnnnnnnnnnnnnnnnnnnnnnnnnnnnnnnnnnnnnnnnnnnnnnnnnnnnnnnnnnnnnnnnnnnnnnnnnnnnnnnnnnnnnnnnnnnnnnnnnnnnnnnnnnnnnnnnnnnnnnnnnnnnnnnnnnnnnnnnnnnnnnnnnnnnnnnnnnnnnnnnnnnnnnnnnnnnnnnnnnnnnnnnnnnnnnnnnnnnnnnnnnnnnnnnnnnnnnnnnnnnnnnnnnnnnnnnnnnnnnnnnnnnnnnnnnnnnnnnnnnnnnnnnnnnnnnnnnnnnnnnnnnnnnnnnnnnnnnnnnnnnnnnnnnnnnnnnnnnnnnnnnnnnnnnnnnnnnnnnnnnnnnnnnnnnnnnnnnnnnnnnnnnnnnnnnnnnnnnnnnnnnnnnnnnnnnnnnnnnnnnnnnnnnnnnnnnnnnnnnnnnnnnnnnnnnnnnnnnnnnnnnnnnnnnnnnnnnnnnnnnnnnnnnnnnnnnnnnnnnnnnnnnnnnnnnnnnnnnnnnnnnnnnnnnnnnnnnnnnnnnnnnnnnnnnnnnnnnnnnnnnnnnnnnnnnnnnnnnnnnnnnnnnnnnnnnnnnnnnnnnnnnnnnnnnnnnnnnnnnnnnnnnnnnnnnnnnnnnnnnnnnnnnnnnnnnnnnnnnnnnnnnnnnnnnnnnnnnnnnnnnnnnnnnnnnnnnnnnnnnnnnnnnnnnnnnnnnnnnnnnnnnnnnnnnnnnnnnnnnnnnnnnnnnnnnnnnnnnnnnnnnnnnnnnnnnnnnnnnnnnnnnnnnnnnnnnnnnnnnnnnnnnnnnnnnnnnnnnnnnnnnnnnnnnnnnnnnnnnnnnnnnnnnnnnnnnnnnnnnnnnnnnnnnnnnnnnnnnnnnnnnnnnnnnnnnnnnnnnnnnnnnnnnnnnnnnnnnnnnnnnnnnnnnnnnnnnnnnnnnnnnnnnnnnnnnnnnnnnnnnnnnnnnnnnnnnnnnnnnnnnnnnnnnnnnnnnnnnnnnnnnnnnnnnnnnnnnnnnnnnnnnnnnnnnnnnnnnnnnnnnnnnnnnnnnnnnnnnnnnnnnnnnnnnnnnnnnnnnnnnnnnnnnnnnnnnnnnnnnnnnnnnnnnnnnnnnnnnnnnnnnnnnnnnnnnnnnnnnnnnnnnnnnnnnnnnnnnnnnnnnnnnnnnnnnnnnnnnnnnnnnnnnnnnnnnnnnnnnnnnnnnnnnnnnnnnnnnnnnnnnnnnnnnnnnnnnnnnnnnnnnnnnnnnnnnnnnnnnnnnnnnnnnnnnnnnnnnnnnnnnnnnnnnnnnnnnnnnnnnnnnnnnnnnnnnnnnnnnnnnnnnnnnnnnnnnnnnnnnnnnnnnnnnnnnnnnnnnnnnnnnnnnnnnnnnnnnnnnnnnnnnnnnnnnnnnnnnnnnnnnnnnnnnnnnnnnnnnnnnnnnnnnnnnnnnnnnnnnnnnnnnnnnnnnnnnnnnnnnnnnnnnnnnnnnnnnnnnnnnnnnnnnnnnnnnnnnnnnnnnnnnnnnnnnnnnnnnnnnnnnnnnnnnnnnnnnnnnnnnnnnnnnnnnnnnnnnnnnnnnnnnnnnnnnnnnnnnnnnnnnnnnnnnnnnnnnnnnnnnnnnnnnnnnnnnnnnnnnnnnnnnnnnnnnnnnnnnnnnnnnnnnnnnnnnnnnnnnnnnnnnnnnnnnnnnnnnnnnnnnnnnnnnnnnnnnnnnnnnnnnnnnnnnnnnnnnnnnnnnnnnnnnnnnnnnnnnnnnnnnnnnnnnnnnnnnnnnnnnnnnnnnnnnnnnnnnnnnnnnnnnnnnnnnnnnnnnnnnnnnnnnnnnnnnnnnnnnnnnnnnnnnnnnnnnnnnnnnnnnnnnnnnnnnnnnnnnnnnnnnnnnnnnnnnnnnnnnnnnnnnnnnnnnnnnnnnnnnnnnnnnnnnnnnnnnnnnnnnnnnnnnnnnnnnnnnnnnnnnnnnnnnnnnnnnnnnnnnnnnnnnnnnnnnnnnnnnnnnnnnnnnnnnnnnnnnnnnnnnnnnnnnnnnnnnnnnnnnnnnnnnnnnnnnnnnnnnnnnnnnnnnnnnnnnnnnnnnnnnnnnnnnnnnnnnnnnnnnnnnnnnnnnnnnnnnnnnnnnnnnnnnnnnnnnnnnnnnnnnnnnnnnnnnnnnnnnnnnnnnnnnnnnnnnnnnnnnnnnnnnnnnnnnnnnnnnnnnnnnnnnnnnnnnnnnnnnnnnnnnnnnnnnnnnnnnnnnnnnnnnnnnnnnnnnnnnnnnnnnnnnnnnnnnnnnnnnnnnnnnnnnnnnnnnnnnnnnnnnnnnnnnnnnnnnnnnnnnnnnnnnnnnnnnnnnnnnnnnnnnnnnnnnnnnnnnnnnnnnnnnnnnnnnnnnnnnnnnnnnnnnnnnnnnnnnnnnnnnnnnnnnnnnnnnnnnnnnnnnnnnnnnnnnnnnnnnnnnnnnnnnnnnnnnnnnnnnnnnnnnnnnnnnnnnnnnnnnnnnnnnnnnnnnnnnnnnnnnnnnnnnnnnnnnnnnnnnnnnnnnnnnnnnnnnnnnnnnnnnnnnnnnnnnnnnnnnnnnnnnnnnnnnnnnnnnnnnnnnnnnnnnnnnnnnnnnnnnnnnnnnnnnnnnnnnnnnnnnnnnnnnnnnnnnnnnnnnnnnnnnnnnnnnnnnnnnnnnnnnnnnnnnnnnnnnnnnnnnnnnnnnnnnnnnnnnnnnnnnnnnnnnnnnnnnnnnnnnnnnnnnnnnnnnnnnnnnnnnnnnnnnnnnnnnnnnnnnnnnnnnnnnnnnnnnnnnnnnnnnnnnnnnnnnnnnnnnnnnnnnnnnnnnnnnnnnnnnnnnnnnnnnnnnnnnnnnnnnnnnnnnnnnnnnnnnnnnnnnnnnnnnnnnnnnnnnnnnnnnnnnnnnnnnnnnnnnnnnnnnnnnnnnnnnnnnnnnnnnnnnnnnnnnnnnnnnnnnnnnnnnnnnnnnnnnnnnnnnnnnnnnnnnnnnnnnnnnnnnnnnnnnnnnnnnnnnnnnnnnnnnnnnnnnnnnnnnnnnnnnnnnnnnnnnnnnnnnnnnnnnnnnnnnnnnnnnnnnnnnnnnnnnnnnnnnnnnnnnnnnnnnnnnnnnnnnnnnnnnnnnnnnnnnnnnnnnnnnnnnnnnnnnnnnnnnnnnnnnnnnnnnnnnnnnnnnnnnnnnnnnnnnnnnnnnnnnnnnnnnnnnnnnnnnnnnnnnnnnnnnnnnnnnnnnnnnnnnnnnnnnnnnnnnnnnnnnnnnnnnnnnnnnnnnnnnnnnnnnnnnnnnnnnnnnnnnnnnnnnnnnnnnnnnnnnnnnnnnnnnnnnnnnnnnnnnnnnnnnnnnnnnnnnnnnnnnnnnnnnnnnnnnnnnnnnnnnnnnnnnnnnnnnnnnnnnnnnnnnnnnnnnnnnnnnnnnnnnnnnnnnnnnnnnnnnnnnnnnnnnnnnnnnnnnnnnnnnnnnnnnnnnnnnnnnnnnnnnnnnnnnnnnnnnnnnnnnnnnnnnnnnnnnnnnnnnnnnnnnnnnnnnnnnnnnnnnnnnnnnnnnnnnnnnnnnnnnnnnnnnnnnnnnnnnnnnnnnnnnnnnnnnnnnnnnnnnnnnnnnnnnnnnnnnnnnnnnnnnnnnnnnnnnnnnnnnnnnnnnnnnnnnnnnnnnnnnnnnnnnnnnnnnnnnnnnnnnnnnnnnnnnnnnnnnnnnnnnnnnnnnnnnnnnnnnnnnnnnnnnnnnnnnnnnnnnnnnnnnnnnnnnnnnnnnnnnnnnnnnnnnnnnnnnnnnnnnnnnnnnnnnnnnnnnnnnnnnnnnnnnnnnnnnnnnnnnnnnnnnnnnnnnnnnnnnnnnnnnnnnnnnnnnnnnnnnnnnnnnnnnnnnnnnnnnnnnnnnnnnnnnnnnnnnnnnnnnnnnnnnnnnnnnnnnnnnnnnnnnnnnnnnnnnnnnnnnnnnnnnnnnnnnnnnnnnnnnnnnnnnnnnnnnnnnnnnnnnnnnnnnnnnnnnnnnnnnnnnnnnnnnnnnnnnnnnnnnnnnnnnnnnnnnnnnnnnnnnnnnnnnnnnnnnnnnnnnnnnnnnnnnnnnnnnnnnnnnnnnnnnnnnnnnnnnnnnnnnnnnnnnnnnnnnnnnnnnnnnnnnnnnnnnnnnnnnnnnnnnnnnnnnnnnnnnnnnnnnnnnnnnnnnnnnnnnnnnnnnnnnnnnnnnnnnnnnnnnnnnnnnnnnnnnnnnnnnnnnnnnnnnnnnnnnnnnnnnnnnnnnnnnnnnnnnnnnnnnnnnnnnnnnnnnnnnnnnnnnnnnnnnnnnnnnnnnnnnnnnnnnnnnnnnnnnnnnnnnnnnnnnnnnnnnnnnnnnnnnnnnnnnnnnnnnnnnnnnnnnnnnnnnnnnnnnnnnnnnnnnnnnnnnnnnnnnnnnnnnnnnnnnnnnnnnnnnnnnnnnnnnnnnnnnnnnnnnnnnnnnnnnnnnnnnnnnnnnnnnnnnnnnnnnnnnnnnnnnnnnnnnnnnnnnnnnnnnnnnnnnnnnnnnnnnnnnnnnnnnnnnnnnnnnnnnnnnnnnnnnnnnnnnnnnnnnnnnnnnnnnnnnnnnnnnnnnnnnnnnnnnnnnnnnnnnnnnnnnnnnnnnnnnnnnnnnnnnnnnnnnnnnnnnnnnnnnnnnnnnnnnnnnnnnnnnnnnnnnnnnnnnnnnnnnnnnnnnnnnnnnnnnnnnnnnnnnnnnnnnnnnnnnnnnnnnnnnnnnnnnnnnnnnnnnnnnnnnnnnnnnnnnnnnnnnnnnnnnnnnnnnnnnnnnnnnnnnnnnnnnnnnnnnnnnnnnnnnnnnnnnnnnnnnnnnnnnnnnnnnnnnnnnnnnnnnnnnnnnnnnnnnnnnnnnnnnnnnnnnnnnnnnnnnnnnnnnnnnnnnnnnnnnnnnnnnnnnnnnnnnnnnnnnnnnnnnnnnnnnnnnnnnnnnnnnnnnnnnnnnnnnnnnnnnnnnnnnnnnnnnnnnnnnnnnnnnnnnnnnnnnnnnnnnnnnnnnnnnnnnnnnnnnnnnnnnnnnnnnnnnnnnnnnnnnnnnnnnnnnnnnnnnnnnnnnnnnnnnnnnnnnnnnnnnnnnnnnnnnnnnnnnnnnnnnnnnnnnnnnnnnnnnnnnnnnnnnnnnnnnnnnnnnnnnnnnnnnnnnnnnnnnnnnnnnnnnnnnnnnnnnnnnnnnnnnnnnnnnnnnnnnnnnnnnnnnnnnnnnnnnnnnnnnnnnnnnnnnnnnnnnnnnnnnnnnnnnnnnnnnnnnnnnnnnnnnnnnnnnnnnnnnnnnnnnnnnnnnnnnnnnnnnnnnnnnnnnnnnnnnnnnnnnnnnnnnnnnnnnnnnnnnnnnnnnnnnnnnnnnnnnnnnnnnnnnnnnnnnnnnnnnnnnnnnnnnnnnnnnnnnnnnnnnnnnnnnnnnnnnnnnnnnnnnnnnnnnnnnnnnnnnnnnnnnnnnnnnnnnnnnnnnnnnnnnnnnnnnnnnnnnnnnnnnnnnnnnnnnnnnnnnnnnnnnnnnnnnnnnnnnnnnnnnnnnnnnnnnnnnnnnnnnnnnnnnnnnnnnnnnnnnnnnnnnnnnnnnnnnnnnnnnnnnnnnnnnnnnnnnnnnnnnnnnnnnnnnnnnnnnnnnnnnnnnnnnnnnnnnnnnnnnnnnnnnnnnnnnnnnnnnnnnnnnnnnnnnnnnnnnnnnnnnnnnnnnnnnnnnnnnnnnnnnnnnnnnnnnnnnnnnnnnnnnnnnnnnnnnnnnnnnnnnnnnnnnnnnnnnnnnnnnnnnnnnnnnnnnnnnnnnnnnnnnnnnnnnnnnnnnnnnnnnnnnnnnnnnnnnnnnnnnnnnnnnnnnnnnnnnnnnnnnnnnnnnnnnnnnnnnnnnnnnnnnnnnnnnnnnnnnnnnnnnnnnnnnnnnnnnnnnnnnnnnnnnnnnnnnnnnnnnnnnnnnnnnnnnnnnnnnnnnnnnnnnnnnnnnnnnnnnnnnnnnnnnnnnnnnnnnnnnnnnnnnnnnnnnnnnnnnnnnnnnnnnnnnnnnnnnnnnnnnnnnnnnnnnnnnnnnnnnnnnnnnnnnnnnnnnnnnnnnnnnnnnnnnnnnnnnnnnnnnnnnnnnnnnnnnnnnnnnnnnnnnnnnnnnnnnnnnnnnnnnnnnnnnnnnnnnnnnnnnnnnnnnnnnnnnnnnnnnnnnnnnnnnnnnnnnnnnnnnnnnnnnnnnnnnnnnnnnnnnnnnnnnnnnnnnnnnnnnnnnnnnnnnnnnnnnnnnnnnnnnnnnnnnnnnnnnnnnnnnnnnnnnnnnnnnnnnnnnnnnnnnnnnnnnnnnnnnnnnnnnnnnnnnnnnnnnnnnnnnnnnnnnnnnnnnnnnnnnnnnnnnnnnnnnnnnnnnnnnnnnnnnnnnnnnnnnnnnnnnnnnnnnnnnnnnnnnnnnnnnnnnnnnnnnnnnnnnnnnnnnnnnnnnnnnnnnnnnnnnnnnnnnnnnnnnnnnnnnnnnnnnnnnnnnnnnnnnnnnnnnnnnnnnnnnnnnnnnnnnnnnnnnnnnnnnnnnnnnnnnnnnnnnnnnnnnnnnnnnnnnnnnnnnnnnnnnnnnnnnnnnnnnnnnnnnnnnnnnnnnnnnnnnnnnnnnnnnnnnnnnnnnnnnnnnnnnnnnnnnnnnnnnnnnnnnnnnnnnnnnnnnnnnnnnnnnnnnnnnnnnnnnnnnnnnnnnnnnnnnnnnnnnnnnnnnnnnnnnnnnnnnnnnnnnnnnnnnnnnnnnnnnnnnnnnnnnnnnnnnnnnnnnnnnnnnnnnnnnnnnnnnnnnnnnnnnnnnnnnnnnnnnnnnnnnnnnnnnnnnnnnnnnnnnnnnnnnnnnnnnnnnnnnnnnnnnnnnnnnnnnnnnnnnnnnnnnnnnnnnnnnnnnnnnnnnnnnnnnnnnnnnnnnnnnnnnnnnnnnnnnnnnnnnnnnnnnnnnnnnnnnnnnnnnnnnnnnnnnnnnnnnnnnnnnnnnnnnnnnnnnnnnnnnnnnnnnnnnnnnnnnnnnnnnnnnnnnnnnnnnnnnnnnnnnnnnnnnnnnnnnnnnnnnnnnnnnnnnnnnnnnnnnnnnnnnnnnnnnnnnnnnnnnnnnnnnnnnnnnnnnnnnnnnnnnnnnnnnnnnnnnnnnnnnnnnnnnnnnnnnnnnnnnnnnnnnnnnnnnnnnnnnnnnnnnnnnnnnnnnnnnnnnnnnnnnnnnnnnnnnnnnnnnnnnnnnnnnnnnnnnnnnnnnnnnnnnnnnnnnnnnnnnnnnnnnnnnnnnnnnnnnnnnnnnnnnnnnnnnnnnnnnnnnnnnnnnnnnnnnnnnnnnnnnnnnnnnnnnnnnnnnnnnnnnnnnnnnnnnnnnnnnnnnnnnnnnnnnnnnnnnnnnnnnnnnnnnnnnnnnnnnnnnnnnnnnnnnnnnnnnnnnnnnnnnnnnnnnnnnnnnnnnnnnnnnnnnnnnnnnnnnnnnnnnnnnnnnnnnnnnnnnnnnnnnnnnnnnnnnnnnnnnnnnnnnnnnnnnnnnnnnnnnnnnnnnnnnnnnnnnnnnnnnnnnnnnnnnnnnnnnnnnnnnnnnnnnnnnnnnnnnnnnnnnnnnnnnnnnnnnnnnnnnnnnnnnnnnnnnnnnnnnnnnnnnnnnnnnnnnnnnnnnnnnnnnnnnnnnnnnnnnnnnnnnnnnnnnnnnnnnnnnnnnnnnnnnnnnnnnnnnnnnnnnnnnnnnnnnnnnnnnnnnnnnnnnnnnnnnnnnnnnnnnnnnnnnnnnnnnnnnnnnnnnnnnnnnnnnnnnnnnnnnnnnnnnnnnnnnnnnnnnnnnnnnnnnnnnnnnnnnnnnnnnnnnnnnnnnnnnnnnnnnnnnnnnnnnnnnnnnnnnnnnnnnnnnnnnnnnnnnnnnnnnnnnnnnnnnnnnnnnnnnnnnnnnnnnnnnnnnnnnnnnnnnnnnnnnnnnnnnnnnnnnnnnnnnnnnnnnnnnnnnnnnnnnnnnnnnnnnnnnnnnnnnnnnnnnnnnnnnnnnnnnnnnnnnnnnnnnnnnnnnnnnnnnnnnnnnnnnnnnnnnnnnnnnnnnnnnnnnnnnnnnnnnnnnnnnnnnnnnnnnnnnnnnnnnnnnnnnnnnnnnnnnnnnnnnnnnnnnnnnnnnnnnnnnnnnnnnnnnnnnnnnnnnnnnnnnnnnnnnnnnnnnnnnnnnnnnnnnnnnnnnnnnnnnnnnnnnnnnnnnnnnnnnnnnnnnnnnnnnnnnnnnnnnnnnnnnnnnnnnnnnnnnnnnnnnnnnnnnnnnnnnnnnnnnnnnnnnnnnnnnnnnnnnnnnnnnnnnnnnnnnnnnnnnnnnnnnnnnnnnnnnnnnnnnnnnnnnnnnnnnnnnnnnnnnnnnnnnnnnnnnnnnnnnnnnnnnnnnnnnnnnnnnnnnnnnnnnnnnnnnnnnnnnnnnnnnnnnnnnnnnnnnnnnnnnnnnnnnnnnnnnnnnnnnnnnnnnnnnnnnnnnnnnnnnnnnnnnnnnnnnnnnnnnnnnnnnnnnnnnnnnnnnnnnnnnnnnnnnnnnnnnnnnnnnnnnnnnnnnnnnnnnnnnnnnnnnnnnnnnnnnnnnnnnnnnnnnnnnnnnnnnnnnnnnnnnnnnnnnnnnnnnnnnnnnnnnnnnnnnnnnnnnnnnnnnnnnnnnnnnnnnnnnnnnnnnnnnnnnnnnnnnnnnnnnnnnnnnnnnnnnnnnnnnnnnnnnnnnnnnnnnnnnnnnnnnnnnnnnnnnnnnnnnnnnnnnnnnnnnnnnnnnnnnnnnnnnnnnnnnnnnnnnnnnnnnnnnnnnnnnnnnnnnnnnnnnnnnnnnnnnnnnnnnnnnnnnnnnnnnnnnnnnnnnnnnnnnnnnnnnnnnnnnnnnnnnnnnnnnnnnnnnnnnnnnnnnnnnnnnnnnnnnnnnnnnnnnnnnnnnnnnnnnnnnnnnnnnnnnnnnnnnnnnnnnnnnnnnnnnnnnnnnnnnnnnnnnnnnnnnnnnnnnnnnnnnnnnnnnnnnnnnnnnnnnnnnnnnnnnnnnnnnnnnnnnnnnnnnnnnnnnnnnnnnnnnnnnnnnnnnnnnnnnnnnnnnnnnnnnnnnnnnnnnnnnnnnnnnnnnnnnnnnnnnnnnnnnnnnnnnnnnnnnnnnnnnnnnnnnnnnnnnnnnnnnnnnnnnnnnnnnnnnnnnnnnnnnnnnnnnnnnnnnnnnnnnnnnnnnnnnnnnnnnnnnnnnnnnnnnnnnnnnnnnnnnnnnnnnnnnnnnnnnnnnnnnnnnnnnnnnnnnnnnnnnnnnnnnnnnnnnnnnnnnnnnnnnnnnnnnnnnnnnnnnnnnnnnnnnnnnnnnnnnnnnnnnnnnnnnnnnnnnnnnnnnnnnnnnnnnnnnnnnnnnnnnnnnnnnnnnnnnnnnnnnnnnnnnnnnnnnnnnnnnnnnnnnnnnnnnnnnnnnnnnnnnnnnnnnnnnnnnnnnnnnnnnnnnnnnnnnnnnnnnnnnnnnnnnnnnnnnnnnnnnnnnnnnnnnnnnnnnnnnnnnnnnnnnnnnnnnnnnnnnnnnnnnnnnnnnnnnnnnnnnnnnnnnnnnnnnnnnnnnnnnnnnnnnnnnnnnnnnnnnnnnnnnnnnnnnnnnnnnnnnnnnnnnnnnnnnnnnnnnnnnnnnnnnnnnnnnnnnnnnnnnnnnnnnnnnnnnnnnnnnnnnnnnnnnnnnnnnnnnnnnnnnnnnnnnnnnnnnnnnnnnnnnnnnnnnnnnnnnnnnnnnnnnnnnnnnnnnnnnnnnnnnnnnnnnnnnnnnnnnnnnnnnnnnnnnnnnnnnnnnnnnnnnnnnnnnnnnnnnnnnnnnnnnnnnnnnnnnnnnnnnnnnnnnnnnnnnnnnnnnnnnnnnnnnnnnnnnnnnnnnnnnnnnnnnnnnnnnnnnnnnnnnnnnnnnnnnnnnnnnnnnnnnnnnnnnnnnnnnnnnnnnnnnnnnnnnnnnnnnnnnnnnnnnnnnnnnnnnnnnnnnnnnnnnnnnnnnnnnnnnnnnnnnnnnnnnnnnnnnnnnnnnnnnnnnnnnnnnnnnnnnnnnnnnnnnnnnnnnnnnnnnnnnnnnnnnnnnnnnnnnnnnnnnnnnnnnnnnnnnnnnnnnnnnnnnnnnnnnnnnnnnnnnnnnnnnnnnnnnnnnnnnnnnnnnnnnnnnnnnnnnnnnnnnnnnnnnnnnnnnnnnnnnnnnnnnnnnnnnnnnnnnnnnnnnnnnnnnnnnnnnnnnnnnnnnnnnnnnnnnnnnnnnnnnnnnnnnnnnnnnnnnnnnnnnnnnnnnnnnnnnnnnnnnnnnnnnnnnnnnnnnnnnnnnnnnnnnnnnnnnnnnnnnnnnnnnnnnnnnnnnnnnnnnnnnnnnnnnnnnnnnnnnnnnnnnnnnnnnnnnnnnnnnnnnnnnnnnnnnnnnnnnnnnnnnnnnnnnnnnnnnnnnnnnnnnnnnnnnnnnnnnnnnnnnnnnnnnnnnnnnnnnnnnnnnnnnnnnnnnnnnnnnnnnnnnnnnnnnnnnnnnnnnnnnnnnnnnnnnnnnnnnnnnnnnnnnnnnnnnnnnnnnnnnnnnnnnnnnnnnnnnnnnnnnnnnnnnnnnnnnnnnnnnnnnnnnnnnnnnnnnnnnnnnnnnnnnnnnnnnnnnnnnnnnnnnnnnnnnnnnnnnnnnnnnnnnnnnnnnnnnnnnnnnnnnnnnnnnnnnnnnnnnnnnnnnnnnnnnnnnnnnnnnnnnnnnnnnnnnnnnnnnnnnnnnnnnnnnnnnnnnnnnnnnnnnnnnnnnnnnnnnnnnnnnnnnnnnnnnnnnnnnnnnnnnnnnnnnnnnnnnnnnnnnnnnnnnnnnnnnnnnnnnnnnnnnnnnnnnnnnnnnnnnnnnnnnnnnnnnnnnnnnnnnnnnnnnnnnnnnnnnnnnnnnnnnnnnnnnnnnnnnnnnnnnnnnnnnnnnnnnnnnnnnnnnnnnnnnnnnnnnnnnnnnnnnnnnnnnnnnnnnnnnnnnnnnnnnnnnnnnnnnnnnnnnnnnnnnnnnnnnnnnnnnnnnnnnnnnnnnnnnnnnnnnnnnnnnnnnnnnnnnnnnnnnnnnnnnnnnnnnnnnnnnnnnnnnnnnnnnnnnnnnnnnnnnnnnnnnnnnnnnnnnnnnnnnnnnnnnnnnnnnnnnnnnnnnnnnnnnnnnnnnnnnnnnnnnnnnnnnnnnnnnnnnnnnnnnnnnnnnnnnnnnnnnnnnnnnnnnnnnnnnnnnnnnnnnnnnnnnnnnnnnnnnnnnnnnnnnnnnnnnnnnnnnnnnnnnnnnnnnnnnnnnnnnnnnnnnnnnnnnnnnnnnnnnnnnnnnnnnnnnnnnnnnnnnnnnnnnnnnnnnnnnnnnnnnnnnnnnnnnnnnnnnnnnnnnnnnnnnnnnnnnnnnnnnnnnnnnnnnnnnnnnnnnnnnnnnnnnnnnnnnnnnnnnnnnnnnnnnnnnnnnnnnnnnnnnnnnnnnnnnnnnnnnnnnnnnnnnnnnnnnnnnnnnnnnnnnnnnnnnnnnnnnnnnnnnnnnnnnnnnnnnnnnnnnnnnnnnnnnnnnnnnnnnnnnnnnnnnnnnnnnnnnnnnnnnnnnnnnnnnnnnnnnnnnnnnnnnnnnnnnnnnnnnnnnnnnnnnnnnnnnnnnnnnnnnnnnnnnnnnnnnnnnnnnnnnnnnnnnnnnnnnnnnnnnnnnnnnnnnnnnnnnnnnnnnnnnnnnnnnnnnnnnnnnnnnnnnnnnnnnnnnnnnnnnnnnnnnnnnnnnnnnnnnnnnnnnnnnnnnnnnnnnnnnnnnnnnnnnnnnnnnnnnnnnnnnnnnnnnnnnnnnnnnnnnnnnnnnnnnnnnnnnnnnnnnnnnnnnnnnnnnnnnnnnnnnnnnnnnnnnnnnnnnnnnnnnnnnnnnnnnnnnnnnnnnnnnnnnnnnnnnnnnnnnnnnnnnnnnnnnnnnnnnnnnnnnnnnnnnnnnnnnnnnnnnnnnnnnnnnnnnnnnnnnnnnnnnnnnnnnnnnnnnnnnnnnnnnnnnnnnnnnnnnnnnnnnnnnnnnnnnnnnnnnnnnnnnnnnnnnnnnnnnnnnnnnnnnnnnnnnnnnnnnnnnnnnnnnnnnnnnnnnnnnnnnnnnnnnnnnnnnnnnnnnnnnnnnnnnnnnnnnnnnnnnnnnnnnnnnnnnnnnnnnnnnnnnnnnnnnnnnnnnnnnnnnnnnnnnnnnnnnnnnnnnnnnnnnnnnnnnnnnnnnnnnnnnnnnnnnnnnnnnnnnnnnnnnnnnnnnnnnnnnnnnnnnnnnnnnnnnnnnnnnnnnnnnnnnnnnnnnnnnnnnnnnnnnnnnnnnnnnnnnnnnnnnnnnnnnnnnnnnnnnnnnnnnnnnnnnnnnnnnnnnnnnnnnnnnnnnnnnnnnnnnnnnnnnnnnnnnnnnnnnnnnnnnnnnnnnnnnnnnnnnnnnnnnnnnnnnnnnnnnnnnnnnnnnnnnnnnnnnnnnnnnnnnnnnnnnnnnnnnnnnnnnnnnnnnnnnnnnnnnnnnnnnnnnnnnnnnnnnnnnnnnnnnnnnnnnnnnnnnnnnnnnnnnnnnnnnnnnnnnnnnnnnnnnnnnnnnnnnnnnnnnnnnnnnnnnnnnnnnnnnnnnnnnnnnnnnnnnnnnnnnnnnnnnnnnnnnnnnnnnnnnnnnnnnnnnnnnnnnnnnnnnnnnnnnnnnnnnnnnnnnnnnnnnnnnnnnnnnnnnnnnnnnnnnnnnnnnnnnnnnnnnnnnnnnnnnnnnnnnnnnnnnnnnnnnnnnnnnnnnnnnnnnnnnnnnnnnnnnnnnnnnnnnnnnnnnnnnnnnnnnnnnnnnnnnnnnnnnnnnnnnnnnnnnnnnnnnnnnnnnnnnnnnnnnnnnnnnnnnnnnnnnnnnnnnnnnnnnnnnnnnnnnnnnnnnnnnnnnnnnnnnnnnnnnnnnnnnnnnnnnnnnnnnnnnnnnnnnnnnnnnnnnnnnnnnnnnnnnnnnnnnnnnnnnnnnnnnnnnnnnnnnnnnnnnnnnnnnnnnnnnnnnnnnnnnnnnnnnnnnnnnnnnnnnnnnnnnnnnnnnnnnnnnnnnnnnnnnnnnnnnnnnnnnnnnnnnnnnnnnnnnnnnnnnnnnnnnnnnnnnnnnnnnnnnnnnnnnnnnnnnnnnnnnnnnnnnnnnnnnnnnnnnnnnnnnnnnnnnnnnnnnnnnnnnnnnnnnnnnnnnnnnnnnnnnnnnnnnnnnnnnnnnnnnnnnnnnnnnnnnnnnnnnnnnnnnnnnnnnnnnnnnnnnnnnnnnnnnnnnnnnnnnnnnnnnnnnnnnnnnnnnnnnnnnnnnnnnnnnnnnnnnnnnnnnnnnnnnnnnnnnnnnnnnnnnnnnnnnnnnnnnnnnnnnnnnnnnnnnnnnnnnnnnnnnnnnnnnnnnnnnnnnnnnnnnnnnnnnnnnnnnnnnnnnnnnnnnnnnnnnnnnnnnnnnnnnnnnnnnnnnnnnnnnnnnnnnnnnnnnnnnnnnnnnnnnnnnnnnnnnnnnnnnnnnnnnnnnnnnnnnnnnnnnnnnnnnnnnnnnnnnnnnnnnnnnnnnnnnnnnnnnnnnnnnnnnnnnnnnnnnnnnnnnnnnnnnnnnnnnnnnnnnnnnnnnnnnnnnnnnnnnnnnnnnnnnnnnnnnnnnnnnnnnnnnnnnnnnnnnnnnnnnnnnnnnnnnnnnnnnnnnnnnnnnnnnnnnnnnnnnnnnnnnnnnnnnnnnnnnnnnnnnnnnnnnnnnnnnnnnnnnnnnnnnnnnnnnnnnnnnnnnnnnnnnnnnnnnnnnnnnnnnnnnnnnnnnnnnnnnnnnnnnnnnnnnnnnnnnnnnnnnnnnnnnnnnnnnnnnnnnnnnnnnnnnnnnnnnnnnnnnnnnnnnnnnnnnnnnnnnnnnnnnnnnnnnnnnnnnnnnnnnnnnnnnnnnnnnnnnnnnnnnnnnnnnnnnnnnnnnnnnnnnnnnnnnnnnnnnnnnnnnnnnnnnnnnnnnnnnnnnnnnnnnnnnnnnnnnnnnnnnnnnnnnnnnnnnnnnnnnnnnnnnnnnnnnnnnnnnnnnnnnnnnnnnnnnnnnnnnnnnnnnnnnnnnnnnnnnnnnnnnnnnnnnnnnnnnnnnnnnnnnnnnnnnnnnnnnnnnnnnnnnnnnnnnnnnnnnnnnnnnnnnnnnnnnnnnnnnnnnnnnnnnnnnnnnnnnnnnnnnnnnnnnnnnnnnnnnnnnnnnnnnnnnnnnnnnnnnnnnnnnnnnnnnnnnnnnnnnnnnnnnnnnnnnnnnnnnnnnnnnnnnnnnnnnnnnnnnnnnnnnnnnnnnnnnnnnnnnnnnnnnnnnnnnnnnnnnnnnnnnnnnnnnnnnnnnnnnnnnnnnnnnnnnnnnnnnnnnnnnnnnnnnnnnnnnnnnnnnnnnnnnnnnnnnnnnnnnnnnnnnnnnnnnnnnnnnnnnnnnnnnnnnnnnnnnnnnnnnnnnnnnnnnnnnnnnnnnnnnnnnnnnnnnnnnnnnnnnnnnnnnnnnnnnnnnnnnnnnnnnnnnnnnnnnnnnnnnnnnnnnnnnnnnnnnnnnnnnnnnnnnnnnnnnnnnnnnnnnnnnnnnnnnnnnnnnnnnnnnnnnnnnnnnnnnnnnnnnnnnnnnnnnnnnnnnnnnnnnnnnnnnnnnnnnnnnnnnnnnnnnnnnnnnnnnnnnnnnnnnnnnnnnnnnnnnnnnnnnnnnnnnnnnnnnnnnnnnnnnnnnnnnnnnnnnnnnnnnnnnnnnnnnnnnnnnnnnnnnnnnnnnnnnnnnnnnnnnnnnnnnnnnnnnnnnnnnnnnnnnnnnnnnnnnnnnnnnnnnnnnnnnnnnnnnnnnnnnnnnnnnnnnnnnnnnnnnnnnnnnnnnnnnnnnnnnnnnnnnnnnnnnnnnnnnnnnnnnnnnnnnnnnnnnnnnnnnnnnnnnnnnnnnnnnnnnnnnnnnnnnnnnnnnnnnnnnnnnnnnnnnnnnnnnnnnnnnnnnnnnnnnnnnnnnnnnnnnnnnnnnnnnnnnnnnnnnnnnnnnnnnnnnnnnnnnnnnnnnnnnnnnnnnnnnnnnnnnnnnnnnnnnnnnnnnnnnnnnnnnnnnnnnnnnnnnnnnnnnnnnnnnnnnnnnnnnnnnnnnnnnnnnnnnnnnnnnnnnnnnnnnnnnnnnnnnnnnnnnnnnnnnnnnnnnnnnnnnnnnnnnnnnnnnnnnnnnnnnnnnnnnnnnnnnnnnnnnnnnnnnnnnnnnnnnnnnnnnnnnnnnnnnnnnnnnnnnnnnnnnnnnnnnnnnnnnnnnnnnnnnnnnnnnnnnnnnnnnnnnnnnnnnnnnnnnnnnnnnnnnnnnnnnnnnnnnnnnnnnnnnnnnnnnnnnnnnnnnnnnnnnnnnnnnnnnnnnnnnnnnnnnnnnnnnnnnnnnnnnnnnnnnnnnnnnnnnnnnnnnnnnnnnnnnnnnnnnnnnnnnnnnnnnnnnnnnnnnnnnnnnnnnnnnnnnnnnnnnnnnnnnnnnnnnnnnnnnnnnnnnnnnnnnnnnnnnnnnnnnnnnnnnnnnnnnnnnnnnnnnnnnnnnnnnnnnnnnnnnnnnnnnnnnnnnnnnnnnnnnnnnnnnnnnnnnnnnnnnnnnnnnnnnnnnnnnnnnnnnnnnnnnnnnnnnnnnnnnnnnnnnnnnnnnnnnnnnnnnnnnnnnnnnnnnnnnnnnnnnnnnnnnnnnnnnnnnnnnnnnnnnnnnnnnnnnnnnnnnnnnnnnnnnnnnnnnnnnnnnnnnnnnnnnnnnnnnnnnnnnnnnnnnnnnnnnnnnnnnnnnnnnnnnnnnnnnnnnnnnnnnnnnnnnnnnnnnnnnnnnnnnnnnnnnnnnnnnnnnnnnnnnnnnnnnnnnnnnnnnnnnnnnnnnnnnnnnnnnnnnnnnnnnnnnnnnnnnnnnnnnnnnnnnnnnnnnnnnnnnnnnnnnnnnnnnnnnnnnnnnnnnnnnnnnnnnnnnnnnnnnnnnnnnnnnnnnnnnnnnnnnnnnnnnnnnnnnnnnnnnnnnnnnnnnnnnnnnnnnnnnnnnnnnnnnnnnnnnnnnnnnnnnnnnnnnnnnnnnnnnnnnnnnnnnnnnnnnnnnnnnnnnnnnnnnnnnnnnnnnnnnnnnnnnnnnnnnnnnnnnnnnnnnnnnnnnnnnnnnnnnnnnnnnnnnnnnnnnnnnnnnnnnnnnnnnnnnnnnnnnnnnnnnnnnnnnnnnnnnnnnnnnnnnnnnnnnnnnnnnnnnnnnnnnnnnnnnnnnnnnnnnnnnnnnnnnnnnnnnnnnnnnnnnnnnnnnnnnnnnnnnnnnnnnnnnnnnnnnnnnnnnnnnnnnnnnnnnnnnnnnnnnnnnnnnnnnnnnnnnnnnnnnnnnnnnnnnnnnnnnnnnnnnnnnnnnnnnnnnnnnnnnnnnnnnnnnnnnnnnnnnnnnnnnnnnnnnnnnnnnnnnnnnnnnnnnnnnnnnnnnnnnnnnnnnnnnnnnnnnnnnnnnnnnnnnnnnnnnnnnnnnnnnnnnnnnnnnnnnnnnnnnnnnnnnnnnnnnnnnnnnnnnnnnnnnnnnnnnnnnnnnnnnnnnnnnnnnnnnnnnnnnnnnnnnnnnnnnnnnnnnnnnnnnnnnnnnnnnnnnnnnnnnnnnnnnnnnnnnnnnnnnnnnnnnnnnnnnnnnnnnnnnnnnnnnnnnnnnnnnnnnnnnnnnnnnnnnnnnnnnnnnnnnnnnnnnnnnnnnnnnnnnnnnnnnnnnnnnnnnnnnnnnnnnnnnnnnnnnnnnnnnnnnnnnnnnnnnnnnnnnnnnnnnnnnnnnnnnnnnnnnnnnnnnnnnnnnnnnnnnnnnnnnnnnnnnnnnnnnnnnnnnnnnnnnnnnnnnnnnnnnnnnnnnnnnnnnnnnnnnnnnnnnnnnnnnnnnnnnnnnnnnnnnnnnnnnnnnnnnnnnnnnnnnnnnnnnnnnnnnnnnnnnnnnnnnnnnnnnnnnnnnnnnnnnnnnnnnnnnnnnnnnnnnnnnnnnnnnnnnnnnnnnnnnnnnnnnnnnnnnnnnnnnnnnnnnnnnnnnnnnnnnnnnnnnnnnnnnnnnnnnnnnnnnnnnnnnnnnnnnnnnnnnnnnnnnnnnnnnnnnnnnnnnnnnnnnnnnnnnnnnnnnnnnnnnnnnnnnnnnnnnnnnnnnnnnnnnnnnnnnnnnnnnnnnnnnnnnnnnnnnnnnnnnnnnnnnnnnnnnnnnnnnnnnnnnnnnnnnnnnnnnnnnnnnnnnnnnnnnnnnnnnnnnnnnnnnnnnnnnnnnnnnnnnnnnnnnnnnnnnnnnnnnnnnnnnnnnnnnnnnnnnnnnnnnnnnnnnnnnnnnnnnnnnnnnnnnnnnnnnnnnnnnnnnnnnnnnnnnnnnnnnnnnnnnnnnnnnnnnnnnnnnnnnnnnnnnnnnnnnnnnnnnnnnnnnnnnnnnnnnnnnnnnnnnnnnnnnnnnnnnnnnnnnnnnnnnnnnnnnnnnnnnnnnnnnnnnnnnnnnnnnnnnnnnnnnnnnnnnnnnnnnnnnnnnnnnnnnnnnnnnnnnnnnnnnnnnnnnnnnnnnnnnnnnnnnnnnnnnnnnnnnnnnnnnnnnnnnnnnnnnnnnnnnnnnnnnnnnnnnnnnnnnnnnnnnnnnnnnnnnnnnnnnnnnnnnnnnnnnnnnnnnnnnnnnnnnnnnnnnnnnnnnnnnnnnnnnnnnnnnnnnnnnnnnnnnnnnnnnnnnnnnnnnnnnnnnnnnnnnnnnnnnnnnnnnnnnnnnnnnnnnnnnnnnnnnnnnnnnnnnnnnnnnnnnnnnnnnnnnnnnnnnnnnnnnnnnnnnnnnnnnnnnnnnnnnnnnnnnnnnnnnnnnnnnnnnnnnnnnnnnnnnnnnnnnnnnnnnnnnnnnnnnnnnnnnnnnnnnnnnnnnnnnnnnnnnnnnnnnnnnnnnnnnnnnnnnnnnnnnnnnnnnnnnnnnnnnnnnnnnnnnnnnnnnnnnnnnnnnnnnnnnnnnnnnnnnnnnnnnnnnnnnnnnnnnnnnnnnnnnnnnnnnnnnnnnnnnnnnnnnnnnnnnnnnnnnnnnnnnnnnnnnnnnnnnnnnnnnnnnnnnnnnnnnnnnnnnnnnnnnnnnnnnnnnnnnnnnnnnnnnnnnnnnnnnnnnnnnnnnnnnnnnnnnnnnnnnnnnnnnnnnnnnnnnnnnnnnnnnnnnnnnnnnnnnnnnnnnnnnnnnnnnnnnnnnnnnnnnnnnnnnnnnnnnnnnnnnnnnnnnnnnnnnnnnnnnnnnnnnnnnnnnnnnnnnnnnnnnnnnnnnnnnnnnnnnnnnnnnnnnnnnnnnnnnnnnnnnnnnnnnnnnnnnnnnnnnnnnnnnnnnnnnnnnnnnnnnnnnnnnnnnnnnnnnnnnnnnnnnnnnnnnnnnnnnnnnnnnnnnnnnnnnnnnnnnnnnnnnnnnnnnnnnnnnnnnnnnnnnnnnnnnnnnnnnnnnnnnnnnnnnnnnnnnnnnnnnnnnnnnnnnnnnnnnnnnnnnnnnnnnnnnnnnnnnnnnnnnnnnnnnnnnnnnnnnnnnnnnnnnnnnnnnnnnnnnnnnnnnnnnnnnnnnnnnnnnnnnnnnnnnnnnnnnnnnnnnnnnnnnnnnnnnnnnnnnnnnnnnnnnnnnnnnnnnnnnnnnnnnnnnnnnnnnnnnnnnnnnnnnnnnnnnnnnnnnnnnnnnnnnnnnnnnnnnnnnnnnnnnnnnnnnnnnnnnnnnnnnnnnnnnnnnnnnnnnnnnnnnnnnnnnnnnnnnnnnnnnnnnnnnnnnnnnnnnnnnnnnnnnnnnnnnnnnnnnnnnnnnnnnnnnnnnnnnnnnnnnnnnnnnnnnnnnnnnnnnnnnnnnnnnnnnnnnnnnnnnnnnnnnnnnnnnnnnnnnnnnnnnnnnnnnnnnnnnnnnnnnnnnnnnnnnnnnnnnnnnnnnnnnnnnnnnnnnnnnnnnnnnnnnnnnnnnnnnnnnnnnnnnnnnnnnnnnnnnnnnnnnnnnnnnnnnnnnnnnnnnnnnnnnnnnnnnnnnnnnnnnnnnnnnnnnnnnnnnnnnnnnnnnnnnnnnnnnnnnnnnnnnnnnnnnnnnnnnnnnnnnnnnnnnnnnnnnnnnnnnnnnnnnnnnnnnnnnnnnnnnnnnnnnnnnnnnnnnnnnnnnnnnnnnnnnnnnnnnnnnnnnnnnnnnnnnnnnnnnnnnnnnnnnnnnnnnnnnnnnnnnnnnnnnnnnnnnnnnnnnnnnnnnnnnnnnnnnnnnnnnnnnnnnnnnnnnnnnnnnnnnnnnnnnnnnnnnnnnnnnnnnnnnnnnnnnnnnnnnnnnnnnnnnnnnnnnnnnnnnnnnnnnnnnnnnnnnnnnnnnnnnnnnnnnnnnnnnnnnnnnnnnnnnnnnnnnnnnnnnnnnnnnnnnnnnnnnnnnnnnnnnnnnnnnnnnnnnnnnnnnnnnnnnnnnnnnnnnnnnnnnnnnnnnnnnnnnnnnnnnnnnnnnnnnnnnnnnnnnnnnnnnnnnnnnnnnnnnnnnnnnnnnnnnnnnnnnnnnnnnnnnnnnnnnnnnnnnnnnnnnnnnnnnnnnnnnnnnnnnnnnnnnnnnnnnnnnnnnnnnnnnnnnnnnnnnnnnnnnnnnnnnnnnnnnnnnnnnnnnnnnnnnnnnnnnnnnnnnnnnnnnnnnnnnnnnnnnnnnnnnnnnnnnnnnnnnnnnnnnnnnnnnnnnnnnnnnnnnnnnnnnnnnnnnnnnnnnnnnnnnnnnnnnnnnnnnnnnnnnnnnnnnnnnnnnnnnnnnnnnnnnnnnnnnnnnnnnnnnnnnnnnnnnnnnnnnnnnnnnnnnnnnnnnnnnnnnnnnnnnnnnnnnnnnnnnnnnnnnnnnnnnnnnnnnnnnnnnnnnnnnnnnnnnnnnnnnnnnnnnnnnnnnnnnnnnnnnnnnnnnnnnnnnnnnnnnnnnnnnnnnnnnnnnnnnnnnnnnnnnnnnnnnnnnnnnnnnnnnnnnnnnnnnnnnnnnnnnnnnnnnnnnnnnnnnnnnnnnnnnnnnnnnnnnnnnnnnnnnnnnnnnnnnnnnnnnnnnnnnnnnnnnnnnnnnnnnnnnnnnnnnnnnnnnnnnnnnnnnnnnnnnnnnnnnnnnnnnnnnnnnnnnnnnnnnnnnnnnnnnnnnnnnnnnnnnnnnnnnnnnnnnnnnnnnnnnnnnnnnnnnnnnnnnnnnnnnnnnnnnnnnnnnnnnnnnnnnnnnnnnnnnnnnnnnnnnnnnnnnnnnnnnnnnnnnnnnnnnnnnnnnnnnnnnnnnnnnnnnnnnnnnnnnnnnnnnnnnnnnnnnnnnnnnnnnnnnnnnnnnnnnnnnnnnnnnnnnnnnnnnnnnnnnnnnnnnnnnnnnnnnnnnnnnnnnnnnnnnnnnnnnnnnnnnnnnnnnnnnnnnnnnnnnnnnnnnnnnnnnnnnnnnnnnnnnnnnnnnnnnnnnnnnnnnnnnnnnnnnnnnnnnnnnnnnnnnnnnnnnnnnnnnnnnnnnnnnnnnnnnnnnnnnnnnnnnnnnnnnnnnnnnnnnnnnnnnnnnnnnnnnnnnnnnnnnnnnnnnnnnnnnnnnnnnnnnnnnnnnnnnnnnnnnnnnnnnnnnnnnnnnnnnnnnnnnnnnnnnnnnnnnnnnnnnnnnnnnnnnnnnnnnnnnnnnnnnnnnnnnnnnnnnnnnnnnnnnnnnnnnnnnnnnnnnnnnnnnnnnnnnnnnnnnnnnnnnnnnnnnnnnnnnnnnnnnnnnnnnnnnnnnnnnnnnnnnnnnnnnnnnnnnnnnnnnnnnnnnnnnnnnnnnnnnnnnnnnnnnnnnnnnnnnnnnnnnnnnnnnnnnnnnnnnnnnnnnnnnnnnnnnnnnnnnnnnnnnnnnnnnnnnnnnnnnnnnnnnnnnnnnnnnnnnnnnnnnnnnnnnnnnnnnnnnnnnnnnnnnnnnnnnnnnnnnnnnnnnnnnnnnnnnnnnnnnnnnnnnnnnnnnnnnnnnnnnnnnnnnnnnnnnnnnnnnnnnnnnnnnnnnnnnnnnnnnnnnnnnnnnnnnnnnnnnnnnnnnnnnnnnnnnnnnnnnnnnnnnnnnnnnnnnnnnnnnnnnnnnnnnnnnnnnnnnnnnnnnnnnnnnnnnnnnnnnnnnnnnnnnnnnnnnnnnnnnnnnnnnnnnnnnnnnnnnnnnnnnnnnnnnnnnnnnnnnnnnnnnnnnnnnnnnnnnnnnnnnnnnnnnnnnnnnnnnnnnnnnnnnnnnnnnnnnnnnnnnnnnnnnnnnnnnnnnnnnnnnnnnnnnnnnnnnnnnnnnnnnnnnnnnnnnnnnnnnnnnnnnnnnnnnnnnnnnnnnnnnnnnnnnnnnnnnnnnnnnnnnnnnnnnnnnnnnnnnnnnnnnnnnnnnnnnnnnnnnnnnnnnnnnnnnnnnnnnnnnnnnnnnnnnnnnnnnnnnnnnnnnnnnnnnnnnnnnnnnnnnnnnnnnnnnnnnnnnnnnnnnnnnnnnnnnnnnnnnnnnnnnnnnnnnnnnnnnnnnnnnnnnnnnnnnnnnnnnnnnnnnnnnnnnnnnnnnnnnnnnnnnnnnnnnnnnnnnnnnnnnnnnnnnnnnnnnnnnnnnnnnnnnnnnnnnnnnnnnnnnnnnnnnnnnnnnnnnnnnnnnnnnnnnnnnnnnnnnnnnnnnnnnnnnnnnnnnnnnnnnnnnnnnnnnnnnnnnnnnnnnnnnnnnnnnnnnnnnnnnnnnnnnnnnnnnnnnnnnnnnnnnnnnnnnnnnnnnnnnnnnnnnnnnnnnnnnnnnnnnnnnnnnnnnnnnnnnnnnnnnnnnnnnnnnnnnnnnnnnnnnnnnnnnnnnnnnnnnnnnnnnnnnnnnnnnnnnnnnnnnnnnnnnnnnnnnnnnnnnnnnnnnnnnnnnnnnnnnnnnnnnnnnnnnnnnnnnnnnnnnnnnnnnnnnnnnnnnnnnnnnnnnnnnnnnnnnnnnnnnnnnnnnnnnnnnnnnnnnnnnnnnnnnnnnnnnnnnnnnnnnnnnnnnnnnnnnnnnnnnnnnnnnnnnnnnnnnnnnnnnnnnnnnnnnnnnnnnnnnnnnnnnnnnnnnnnnnnnnnnnnnnnnnnnnnnnnnnnnnnnnnnnnnnnnnnnnnnnnnnnnnnnnnnnnnnnnnnnnnnnnnnnnnnnnnnnnnnnnnnnnnnnnnnnnnnnnnnnnnnnnnnnnnnnnnnnnnnnnnnnnnnnnnnnnnnnnnnnnnnnnnnnnnnnnnnnnnnnnnnnnnnnnnnnnnnnnnnnnnnnnnnnnnnnnnnnnnnnnnnnnnnnnnnnnnnnnnnnnnnnnnnnnnnnnnnnnnnnnnnnnnnnnnnnnnnnnnnnnnnnnnnnnnnnnnnnnnnnnnnnnnnnnnnnnnnnnnnnnnnnnnnnnnnnnnnnnnnnnnnnnnnnnnnnnnnnnnnnnnnnnnnnnnnnnnnnnnnnnnnnnnnnnnnnnnnnnnnnnnnnnnnnnnnnnnnnnnnnnnnnnnnnnnnnnnnnnnnnnnnnnnnnnnnnnnnnnnnnnnnnnnnnnnnnnnnnnnnnnnnnnnnnnnnnnnnnnnnnnnnnnnnnnnnnnnnnnnnnnnnnnnnnnnnnnnnnnnnnnnnnnnnnnnnnnnnnnnnnnnnnnnnnnnnnnnnnnnnnnnnnnnnnnnnnnnnnnnnnnnnnnnnnnnnnnnnnnnnnnnnnnnnnnnnnnnnnnnnnnnnnnnnnnnnnnnnnnnnnnnnnnnnnnnnnnnnnnnnnnnnnnnnnnnnnnnnnnnnnnnnnnnnnnnnnnnnnnnnnnnnnnnnnnnnnnnnnnnnnnnnnnnnnnnnnnnnnnnnnnnnnnnnnnnnnnnnnnnnnnnnnnnnnnnnnnnnnnnnnnnnnnnnnnnnnnnnnnnnnnnnnnnnnnnnnnnnnnnnnnnnnnnnnnnnnnnnnnnnnnnnnnnnnnnnnnnnnnnnnnnnnnnnnnnnnnnnnnnnnnnnnnnnnnnnnnnnnnnnnnnnnnnnnnnnnnnnnnnnnnnnnnnnnnnnnnnnnnnnnnnnnnnnnnnnnnnnnnnnnnnnnnnnnnnnnnnnnnnnnnnnnnnnnnnnnnnnnnnnnnnnnnnnnnnnnnnnnnnnnnnnnnnnnnnnnnnnnnnnnnnnnnnnnnnnnnnnnnnnnnnnnnnnnnnnnnnnnnnnnnnnnnnnnnnnnnnnnnnnnnnnnnnnnnnnnnnnnnnnnnnnnnnnnnnnnnnnnnnnnnnnnnnnnnnnnnnnnnnnnnnnnnnnnnnnnnnnnnnnnnnnnnnnnnnnnnnnnnnnnnnnnnnnnnnnnnnnnnnnnnnnnnnnnnnnnnnnnnnnnnnnnnnnnnnnnnnnnnnnnnnnnnnnnnnnnnnnnnnnnnnnnnnnnnnnnnnnnnnnnnnnnnnnnnnnnnnnnnnnnnnnnnnnnnnnnnnnnnnnnnnnnnnnnnnnnnnnnnnnnnnnnnnnnnnnnnnnnnnnnnnnnnnnnnnnnnnnnnnnnnnnnnnnnnnnnnnnnnnnnnnnnnnnnnnnnnnnnnnnnnnnnnnnnnnnnnnnnnnnnnnnnnnnnnnnnnnnnnnnnnnnnnnnnnnnnnnnnnnnnnnnnnnnnnnnnnnnnnnnnnnnnnnnnnnnnnnnnnnnnnnnnnnnnnnnnnnnnnnnnnnnnnnnnnnnnnnnnnnnnnnnnnnnnnnnnnnnnnnnnnnnnnnnnnnnnnnnnnnnnnnnnnnnnnnnnnnnnnnnnnnnnnnnnnnnnnnnnnnnnnnnnnnnnnnnnnnnnnnnnnnnnnnnnnnnnnnnnnnnnnnnnnnnnnnnnnnnnnnnnnnnnnnnnnnnnnnnnnnnnnnnnnnnnnnnnnnnnnnnnnnnnnnnnnnnnnnnnnnnnnnnnnnnnnnnnnnnnnnnnnnnnnnnnnnnnnnnnnnnnnnnnnnnnnnnnnnnnnnnnnnnnnnnnnnnnnnnnnnnnnnnnnnnnnnnnnnnnnnnnnnnnnnnnnnnnnnnnnnnnnnnnnnnnnnnnnnnnnnnnnnnnnnnnnnnnnnnnnnnnnnnnnnnnnnnnnnnnnnnnnnnnnnnnnnnnnnnnnnnnnnnnnnnnnnnnnnnnnnnnnnnnnnnnnnnnnnnnnnnnnnnnnnnnnnnnnnnnnnnnnnnnnnnnnnnnnnnnnnnnnnnnnnnnnnnnnnnnnnnnnnnnnnnnnnnnnnnnnnnnnnnnnnnnnnnnnnnnnnnnnnnnnnnnnnnnnnnnnnnnnnnnnnnnnnnnnnnnnnnnnnnnnnnnnnnnnnnnnnnnnnnnnnnnnnnnnnnnnnnnnnnnnnnnnnnnnnnnnnnnnnnnnnnnnnnnnnnnnnnnnnnnnnnnnnnnnnnnnnnnnnnnnnnnnnnnnnnnnnnnnnnnnnnnnnnnnnnnnnnnnnnnnnnnnnnnnnnnnnnnnnnnnnnnnnnnnnnnnnnnnnnnnnnnnnnnnnnnnnnnnnnnnnnnnnnnnnnnnnnnnnnnnnnnnnnnnnnnnnnnnnnnnnnnnnnnnnnnnnnnnnnnnnnnnnnnnnnnnnnnnnnnnnnnnnnnnnnnnnnnnnnnnnnnnnnnnnnnnnnnnnnnnnnnnnnnnnnnnnnnnnnnnnnnnnnnnnnnnnnnnnnnnnnnnnnnnnnnnnnnnnnnnnnnnnnnnnnnnnnnnnnnnnnnnnnnnnnnnnnnnnnnnnnnnnnnnnnnnnnnnnnnnnnnnnnnnnnnnnnnnnnnnnnnnnnnnnnnnnnnnnnnnnnnnnnnnnnnnnnnnnnnnnnnnnnnnnnnnnnnnnnnnnnnnnnnnnnnnnnnnnnnnnnnnnnnnnnnnnnnnnnnnnnnnnnnnnnnnnnnnnnnnnnnnnnnnnnnnnnnnnnnnnnnnnnnnnnnnnnnnnnnnnnnnnnnnnnnnnnnnnnnnnnnnnnnnnnnnnnnnnnnnnnnnnnnnnnnnnnnnnnnnnnnnnnnnnnnnnnnnnnnnnnnnnnnnnnnnnnnnnnnnnnnnnnnnnnnnnnnnnnnnnnnnnnnnnnnnnnnnnnnnnnnnnnnnnnnnnnnnnnnnnnnnnnnnnnnnnnnnnnnnnnnnnnnnnnnnnnnnnnnnnnnnnnnnnnnnnnnnnnnnnnnnnnnnnnnnnnnnnnnnnnnnnnnnnnnnnnnnnnnnnnnnnnnnnnnnnnnnnnnnnnnnnnnnnnnnnnnnnnnnnnnnnnnnnnnnnnnnnnnnnnnnnnnnnnnnnnnnnnnnnnnnnnnnnnnnnnnnnnnnnnnnnnnnnnnnnnnnnnnnnnnnnnnnnnnnnnnnnnnnnnnnnnnnnnnnnnnnnnnnnnnnnnnnnnnnnnnnnnnnnnnnnnnnnnnnnnnnnnnnnnnnnnnnnnnnnnnnnnnnnnnnnnnnnnnnnnnnnnnnnnnnnnnnnnnnnnnnnnnnnnnnnnnnnnnnnnnnnnnnnnnnnnnnnnnnnnnnnnnnnnnnnnnnnnnnnnnnnnnnnnnnnnnnnnnnnnnnnnnnnnnnnnnnnnnnnnnnnnnnnnnnnnnnnnnnnnnnnnnnnnnnnnnnnnnnnnnnnnnnnnnnnnnnnnnnnnnnnnnnnnnnnnnnnnnnnnnnnnnnnnnnnnnnnnnnnnnnnnnnnnnnnnnnnnnnnnnnnnnnnnnnnnnnnnnnnnnnnnnnnnnnnnnnnnnnnnnnnnnnnnnnnnnnnnnnnnnnnnnnnnnnnnnnnnnnnnnnnnnnnnnnnnnnnnnnnnnnnnnnnnnnnnnnnnnnnnnnnnnnnnnnnnnnnnnnnnnnnnnnnnnnnnnnnnnnnnnnnnnnnnnnnnnnnnnnnnnnnnnnnnnnnnnnnnnnnnnnnnnnnnnnnnnnnnnnnnnnnnnnnnnnnnnnnnnnnnnnnnnnnnnnnnnnnnnnnnnnnnnnnnnnnnnnnnnnnnnnnnnnnnnnnnnnnnnnnnnnnnnnnnnnnnnnnnnnnnnnnnnnnnnnnnnnnnnnnnnnnnnnnnnnnnnnnnnnnnnnnnnnnnnnnnnnnnnnnnnnnnnnnnnnnnnnnnnnnnnnnnnnnnnnnnnnnnnnnnnnnnnnnnnnnnnnnnnnnnnnnnnnnnnnnnnnnnnnnnnnnnnnnnnnnnnnnnnnnnnnnnnnnnnnnnnnnnnnnnnnnnnnnnnnnnnnnnnnnnnnnnnnnnnnnnnnnnnnnnnnnnnnnnnnnnnnnnnnnnnnnnnnnnnnnnnnnnnnnnnnnnnnnnnnnnnnnnnnnnnnnnnnnnnnnnnnnnnnnnnnnnnnnnnnnnnnnnnnnnnnnnnnnnnnnnnnnnnnnnnnnnnnnnnnnnnnnnnnnnnnnnnnnnnnnnnnnnnnnnnnnnnnnnnnnnnnnnnnnnnnnnnnnnnnnnnnnnnnnnnnnnnnnnnnnnnnnnnnnnnnnnnnnnnnnnnnnnnnnnnnnnnnnnnnnnnnnnnnnnnnnnnnnnnnnnnnnnnnnnnnnnnnnnnnnnnnnnnnnnnnnnnnnnnnnnnnnnnnnnnnnnnnnnnnnnnnnnnnnnnnnnnnnnnnnnnnnnnnnnnnnnnnnnnnnnnnnnnnnnnnnnnnnnnnnnnnnnnnnnnnnnnnnnnnnnnnnnnnnnnnnnnnnnnnnnnnnnnnnnnnnnnnnnnnnnnnnnnnnnnnnnnnnnnnnnnnnnnnnnnnnnnnnnnnnnnnnnnnnnnnnnnnnnnnnnnnnnnnnnnnnnnnnnnnnnnnnnnnnnnnnnnnnnnnnnnnnnnnnnnnnnnnnnnnnnnnnnnnnnnnnnnnnnnnnnnnnnnnnnnnnnnnnnnnnnnnnnnnnnnnnnnnnnnnnnnnnnnnnnnnnnnnnnnnnnnnnnnnnnnnnnnnnnnnnnnnnnnnnnnnnnnnnnnnnnnnnnnnnnnnnnnnnnnnnnnnnnnnnnnnnnnnnnnnnnnnnnnnnnnnnnnnnnnnnnnnnnnnnnnnnnnnnnnnnnnnnnnnnnnnnnnnnnnnnnnnnnnnnnnnnnnnnnnnnnnnnnnnnnnnnnnnnnnnnnnnnnnnnnnnnnnnnnnnnnnnnnnnnnnnnnnnnnnnnnnnnnnnnnnnnnnnnnnnnnnnnnnnnnnnnnnnnnnnnnnnnnnnnnnnnnnnnnnnnnnnnnnnnnnnnnnnnnnnnnnnnnnnnnnnnnnnnnnnnnnnnnnnnnnnnnnnnnnnnnnnnnnnnnnnnnnnnnnnnnnnnnnnnnnnnnnnnnnnnnnnnnnnnnnnnnnnnnnnnnnnnnnnnnnnnnnnnnnnnnnnnnnnnnnnnnnnnnnnnnnnnnnnnnnnnnnnnnnnnnnnnnnnnnnnnnnnnnnnnnnnnnnnnnnnnnnnnnnnnnnnnnnnnnnnnnnnnnnnnnnnnnnnnnnnnnnnnnnnnnnnnnnnnnnnnnnnnnnnnnnnnnnnnnnnnnnnnnnnnnnnnnnnnnnnnnnnnnnnnnnnnnnnnnnnnnnnnnnnnnnnnnnnnnnnnnnnnnnnnnnnnnnnnnnnnnnnnnnnnnnnnnnnnnnnnnnnnnnnnnnnnnnnnnnnnnnnnnnnnnnnnnnnnnnnnnnnnnnnnnnnnnnnnnnnnnnnnnnnnnnnnnnnnnnnnnnnnnnnnnnnnnnnnnnnnnnnnnnnnnnnnnnnnnnnnnnnnnnnnnnnnnnnnnnnnnnnnnnnnnnnnnnnnnnnnnnnnnnnnnnnnnnnnnnnnnnnnnnnnnnnnnnnnnnnnnnnnnnnnnnnnnnnnnnnnnnnnnnnnnnnnnnnnnnnnnnnnnnnnnnnnnnnnnnnnnnnnnnnnnnnnnnnnnnnnnnnnnnnnnnnnnnnnnnnnnnnnnnnnnnnnnnnnnnnnnnnnnnnnnnnnnnnnnnnnnnnnnnnnnnnnnnnnnnnnnnnnnnnnnnnnnnnnnnnnnnnnnnnnnnnnnnnnnnnnnnnnnnnnnnnnnnnnnnnnnnnnnnnnnnnnnnnnnnnnnnnnnnnnnnnnnnnnnnnnnnnnnnnnnnnnnnnnnnnnnnnnnnnnnnnnnnnnnnnnnnnnnnnnnnnnnnnnnnnnnnnnnnnnnnnnnnnnnnnnnnnnnnnnnnnnnnnnnnnnnnnnnnnnnnnnnnnnnnnnnnnnnnnnnnnnnnnnnnnnnnnnnnnnnnnnnnnnnnnnnnnnnnnnnnnnnnnnnnnnnnnnnnnnnnnnnnnnnnnnnnnnnnnnnnnnnnnnnnnnnnnnnnnnnnnnnnnnnnnnnnnnnnnnnnnnnnnnnnnnnnnnnnnnnnnnnnnnnnnnnnnnnnnnnnnnnnnnnnnnnnnnnnnnnnnnnnnnnnnnnnnnnnnnnnnnnnnnnnnnnnnnnnnnnnnnnnnnnnnnnnnnnnnnnnnnnnnnnnnnnnnnnnnnnnnnnnnnnnnnnnnnnnnnnnnnnnnnnnnnnnnnnnnnnnnnnnnnnnnnnnnnnnnnnnnnnnnnnnnnnnnnnnnnnnnnnnnnnnnnnnnnnnnnnnnnnnnnnnnnnnnnnnnnnnnnnnnnnnnnnnnnnnnnnnnnnnnnnnnnnnnnnnnnnnnnnnnnnnnnnnnnnnnnnnnnnnnnnnnnnnnnnnnnnnnnnnnnnnnnnnnnnnnnnnnnnnnnnnnnnnnnnnnnnnnnnnnnnnnnnnnnnnnnnnnnnnnnnnnnnnnnnnnnnnnnnnnnnnnnnnnnnnnnnnnnnnnnnnnnnnnnnnnnnnnnnnnnnnnnnnnnnnnnnnnnnnnnnnnnnnnnnnnnnnnnnnnnnnnnnnnnnnnnnnnnnnnnnnnnnnnnnnnnnnnnnnnnnnnnnnnnnnnnnnnnnnnnnnnnnnnnnnnnnnnnnnnnnnnnnnnnnnnnnnnnnnnnnnnnnnnnnnnnnnnnnnnnnnnnnnnnnnnnnnnnnnnnnnnnnnnnnnnnnnnnnnnnnnnnnnnnnnnnnnnnnnnnnnnnnnnnnnnnnnnnnnnnnnnnnnnnnnnnnnnnnnnnnnnnnnnnnnnnnnnnnnnnnnnnnnnnnnnnnnnnnnnnnnnnnnnnnnnnnnnnnnnnnnnnnnnnnnnnnnnnnnnnnnnnnnnnnnnnnnnnnnnnnnnnnnnnnnnnnnnnnnnnnnnnnnnnnnnnnnnnnnnnnnnnnnnnnnnnnnnnnnnnnnnnnnnnnnnnnnnnnnnnnnnnnnnnnnnnnnnnnnnnnnnnnnnnnnnnnnnnnnnnnnnnnnnnnnnnnnnnnnnnnnnnnnnnnnnnnnnnnnnnnnnnnnnnnnnnnnnnnnnnnnnnnnnnnnnnnnnnnnnnnnnnnnnnnnnnnnnnnnnnnnnnnnnnnnnnnnnnnnnnnnnnnnnnnnnnnnnnnnnnnnnnnnnnnnnnnnnnnnnnnnnnnnnnnnnnnnnnnnnnnnnnnnnnnnnnnnnnnnnnnnnnnnnnnnnnnnnnnnnnnnnnnnnnnnnnnnnnnnnnnnnnnnnnnnnnnnnnnnnnnnnnnnnnnnnnnnnnnnnnnnnnnnnnnnnnnnnnnnnnnnnnnnnnnnnnnnnnnnnnnnnnnnnnnnnnnnnnnnnnnnnnnnnnnnnnnnnnnnnnnnnnnnnnnnnnnnnnnnnnnnnnnnnnnnnnnnnnnnnnnnnnnnnnnnnnnnnnnnnnnnnnnnnnnnnnnnnnnnnnnnnnnnnnnnnnnnnnnnnnnnnnnnnnnnnnnnnnnnnnnnnnnnnnnnnnnnnnnnnnnnnnnnnnnnnnnnnnnnnnnnnnnnnnnnnnnnnnnnnnnnnnnnnnnnnnnnnnnnnnnnnnnnnnnnnnnnnnnnnnnnnnnnnnnnnnnnnnnnnnnnnnnnnnnnnnnnnnnnnnnnnnnnnnnnnnnnnnnnnnnnnnnnnnnnnnnnnnnnnnnnnnnnnnnnnnnnnnnnnnnnnnnnnnnnnnnnnnnnnnnnnnnnnnnnnnnnnnnnnnnnnnnnnnnnnnnnnnnnnnnnnnnnnnnnnnnnnnnnnnnnnnnnnnnnnnnnnnnnnnnnnnnnnnnnnnnnnnnnnnnnnnnnnnnnnnnnnnnnnnnnnnnnnnnnnnnnnnnnnnnnnnnnnnnnnnnnnnnnnnnnnnnnnnnnnnnnnnnnnnnnnnnnnnnnnnnnnnnnnnnnnnnnnnnnnnnnnnnnnnnnnnnnnnnnnnnnnnnnnnnnnnnnnnnnnnnnnnnnnnnnnnnnnnnnnnnnnnnnnnnnnnnnnnnnnnnnnnnnnnnnnnnnnnnnnnnnnnnnnnnnnnnnnnnnnnnnnnnnnnnnnnnnnnnnnnnnnnnnnnnnnnnnnnnnnnnnnnnnnnnnnnnnnnnnnnnnnnnnnnnnnnnnnnnnnnnnnnnnnnnnnnnnnnnnnnnnnnnnnnnnnnnnnnnnnnnnnnnnnnnnnnnnnnnnnnnnnnnnnnnnnnnnnnnnnnnnnnnnnnnnnnnnnnnnnnnnnnnnnnnnnnnnnnnnnnnnnnnnnnnnnnnnnnnnnnnnnnnnnnnnnnnnnnnnnnnnnnnnnnnnnnnnnnnnnnnnnnnnnnnnnnnnnnnnnnnnnnnnnnnnnnnnnnnnnnnnnnnnnnnnnnnnnnnnnnnnnnnnnnnnnnnnnnnnnnnnnnnnnnnnnnnnnnnnnnnnnnnnnnnnnnnnnnnnnnnnnnnnnnnnnnnnnnnnnnnnnnnnnnnnnnnnnnnnnnnnnnnnnnnnnnnnnnnnnnnnnnnnnnnnnnnnnnnnnnnnnnnnnnnnnnnnnnnnnnnnnnnnnnnnnnnnnnnnnnnnnnnnnnnnnnnnnnnnnnnnnnnnnnnnnnnnnnnnnnnnnnnnnnnnnnnnnnnnnnnnnnnnnnnnnnnnnnnnnnnnnnnnnnnnnnnnnnnnnnnnnnnnnnnnnnnnnnnnnnnnnnnnnnnnnnnnnnnnnnnnnnnnnnnnnnnnnnnnnnnnnnnnnnnnnnnnnnnnnnnnnnnnnnnnnnnnnnnnnnnnnnnnnnnnnnnnnnnnnnnnnnnnnnnnnnnnnnnnnnnnnnnnnnnnnnnnnnnnnnnnnnnnnnnnnnnnnnnnnnnnnnnnnnnnnnnnnnnnnnnnnnnnnnnnnnnnnnnnnnnnnnnnnnnnnnnnnnnnnnnnnnnnnnnnnnnnnnnnnnnnnnnnnnnnnnnnnnnnnnnnnnnnnnnnnnnnnnnnnnnnnnnnnnnnnnnnnnnnnnnnnnnnnnnnnnnnnnnnnnnnnnnnnnnnnnnnnnnnnnnnnnnnnnnnnnnnnnnnnnnnnnnnnnnnnnnnnnnnnnnnnnnnnnnnnnnnnnnnnnnnnnnnnnnnnnnnnnnnnnnnnnnnnnnnnnnnnnnnnnnnnnnnnnnnnnnnnnnnnnnnnnnnnnnnnnnnnnnnnnnnnnnnnnnnnnnnnnnnnnnnnnnnnnnnnnnnnnnnnnnnnnnnnnnnnnnnnnnnnnnnnnnnnnnnnnnnnnnnnnnnnnnnnnnnnnnnnnnnnnnnnnnnnnnnnnnnnnnnnnnnnnnnnnnnnnnnnnnnnnnnnnnnnnnnnnnnnnnnnnnnnnnnnnnnnnnnnnnnnnnnnnnnnnnnnnnnnnnnnnnnnnnnnnnnnnnnnnnnnnnnnnnnnnnnnnnnnnnnnnnnnnnnnnnnnnnnnnnnnnnnnnnnnnnnnnnnnnnnnnnnnnnnnnnnnnnnnnnnnnnnnnnnnnnnnnnnnnnnnnnnnnnnnnnnnnnnnnnnnnnnnnnnnnnnnnnnnnnnnnnnnnnnnnnnnnnnnnnnnnnnnnnnnnnnnnnnnnnnnnnnnnnnnnnnnnnnnnnnnnnnnnnnnnnnnnnnnnnnnnnnnnnnnnnnnnnnnnnnnnnnnnnnnnnnnnnnnnnnnnnnnnnnnnnnnnnnnnnnnnnnnnnnnnnnnnnnnnnnnnnnnnnnnnnnnnnnnnnnnnnnnnnnnnnnnnnnnnnnnnnnnnnnnnnnnnnnnnnnnnnnnnnnnnnnnnnnnnnnnnnnnnnnnnnnnnnnnnnnnnnnnnnnnnnnnnnnnnnnnnnnnnnnnnnnnnnnnnnnnnnnnnnnnnnnnnnnnnnnnnnnnnnnnnnnnnnnnnnnnnnnnnnnnnnnnnnnnnnnnnnnnnnnnnnnnnnnnnnnnnnnnnnnnnnnnnnnnnnnnnnnnnnnnnnnnnnnnnnnnnnnnnnnnnnnnnnnnnnnnnnnnnnnnnnnnnnnnnnnnnnnnnnnnnnnnnnnnnnnnnnnnnnnnnnnnnnnnnnnnnnnnnnnnnnnnnnnnnnnnnnnnnnnnnnnnnnnnnnnnnnnnnnnnnnnnnnnnnnnnnnnnnnnnnnnnnnnnnnnnnnnnnnnnnnnnnnnnnnnnnnnnnnnnnnnnnnnnnnnnnnnnnnnnnnnnnnnnnnnnnnnnnnnnnnnnnnnnnnnnnnnnnnnnnnnnnnnnnnnnnnnnnnnnnnnnnnnnnnnnnnnnnnnnnnnnnnnnnnnnnnnnnnnnnnnnnnnnnnnnnnnnnnnnnnnnnnnnnnnnnnnnnnnnnnnnnnnnnnnnnnnnnnnnnnnnnnnnnnnnnnnnnnnnnnnnnnnnnnnnnnnnnnnnnnnnnnnnnnnnnnnnnnnnnnnnnnnnnnnnnnnnnnnnnnnnnnnnnnnnnnnnnnnnnnnnnnnnnnnnnnnnnnnnnnnnnnnnnnnnnnnnnnnnnnnnnnnnnnnnnnnnnnnnnnnnnnnnnnnnnnnnnnnnnnnnnnnnnnnnnnnnnnnnnnnnnnnnnnnnnnnnnnnnnnnnnnnnnnnnnnnnnnnnnnnnnnnnnnnnnnnnnnnnnnnnnnnnnnnnnnnnnnnnnnnnnnnnnnnnnnnnnnnnnnnnnnnnnnnnnnnnnnnnnnnnnnnnnnnnnnnnnnnnnnnnnnnnnnnnnnnnnnnnnnnnnnnnnnnnnnnnnnnnnnnnnnnnnnnnnnnnnnnnnnnnnnnnnnnnnnnnnnnnnnnnnnnnnnnnnnnnnnnnnnnnnnnnnnnnnnnnnnnnnnnnnnnnnnnnnnnnnnnnnnnnnnnnnnnnnnnnnnnnnnnnnnnnnnnnnnnnnnnnnnnnnnnnnnnnnnnnnnnnnnnnnnnnnnnnnnnnnnnnnnnnnnnnnnnnnnnnnnnnnnnnnnnnnnnnnnnnnnnnnnnnnnnnnnnnnnnnnnnnnnnnnnnnnnnnnnnnnnnnnnnnnnnnnnnnnnnnnnnnnnnnnnnnnnnnnnnnnnnnnnnnnnnnnnnnnnnnnnnnnnnnnnnnnnnnnnnnnnnnnnnnnnnnnnnnnnnnnnnnnnnnnnnnnnnnnnnnnnnnnnnnnnnnnnnnnnnnnnnnnnnnnnnnnnnnnnnnnnnnnnnnnnnnnnnnnnnnnnnnnnnnnnnnnnnnnnnnnnnnnnnnnnnnnnnnnnnnnnnnnnnnnnnnnnnnnnnnnnnnnnnnnnnnnnnnnnnnnnnnnnnnnnnnnnnnnnnnnnnnnnnnnnnnnnnnnnnnnnnnnnnnnnnnnnnnnnnnnnnnnnnnnnnnnnnnnnnnnnnnnnnnnnnnnnnnnnnnnnnnnnnnnnnnnnnnnnnnnnnnnnnnnnnnnnnnnnnnnnnnnnnnnnnnnnnnnnnnnnnnnnnnnnnnnnnnnnnnnnnnnnnnnnnnnnnnnnnnnnnnnnnnnnnnnnnnnnnnnnnnnnnnnnnnnnnnnnnnnnnnnnnnnnnnnnnnnnnnnnnnnnnnnnnnnnnnnnnnnnnnnnnnnnnnnnnnnnnnnnnnnnnnnnnnnnnnnnnnnnnnnnnnnnnnnnnnnnnnnnnnnnnnnnnnnnnnnnnnnnnnnnnnnnnnnnnnnnnnnnnnnnnnnnnnnnnnnnnnnnnnnnnnnnnnnnnnnnnnnnnnnnnnnnnnnnnnnnnnnnnnnnnnnnnnnnnnnnnnnnnnnnnnnnnnnnnnnnnnnnnnnnnnnnnnnnnnnnnnnnnnnnnnnnnnnnnnnnnnnnnnnnnnnnnnnnnnnnnnnnnnnnnnnnnnnnnnnnnnnnnnnnnnnnnnnnnnnnnnnnnnnnnnnnnnnnnnnnnnnnnnnnnnnnnnnnnnnnnnnnnnnnnnnnnnnnnnnnnnnnnnnnnnnnnnnnnnnnnnnnnnnnnnnnnnnnnnnnnnnnnnnnnnnnnnnnnnnnnnnnnnnnnnnnnnnnnnnnnnnnnnnnnnnnnnnnnnnnnnnnnnnnnnnnnnnnnnnnnnnnnnnnnnnnnnnnnnnnnnnnnnnnnnnnnnnnnnnnnnnnnnnnnnnnnnnnnnnnnnnnnnnnnnnnnnnnnnnnnnnnnnnnnnnnnnnnnnnnnnnnnnnnnnnnnnnnnnnnnnnnnnnnnnnnnnnnnnnnnnnnnnnnnnnnnnnnnnnnnnnnnnnnnnnnnnnnnnnnnnnnnnnnnnnnnnnnnnnnnnnnnnnnnnnnnnnnnnnnnnnnnnnnnnnnnnnnnnnnnnnnnnnnnnnnnnnnnnnnnnnnnnnnnnnnnnnnnnnnnnnnnnnnnnnnnnnnnnnnnnnnnnnnnnnnnnnnnnnnnnnnnnnnnnnnnnnnnnnnnnnnnnnnnnnnnnnnnnnnnnnnnnnnnnnnnnnnnnnnnnnnnnnnnnnnnnnnnnnnnnnnnnnnnnnnnnnnnnnnnnnnnnnnnnnnnnnnnnnnnnnnnnnnnnnnnnnnnnnnnnnnnnnnnnnnnnnnnnnnnnnnnnnnnnnnnnnnnnnnnnnnnnnnnnnnnnnnnnnnnnnnnnnnnnnnnnnnnnnnnnnnnnnnnnnnnnnnnnnnnnnnnnnnnnnnnnnnnnnnnnnnnnnnnnnnnnnnnnnnnnnnnnnnnnnnnnnnnnnnnnnnnnnnnnnnnnnnnnnnnnnnnnnnnnnnnnnnnnnnnnnnnnnnnnnnnnnnnnnnnnnnnnnnnnnnnnnnnnnnnnnnnnnnnnnnnnnnnnnnnnnnnnnnnnnnnnnnnnnnnnnnnnnnnnnnnnnnnnnnnnnnnnnnnnnnnnnnnnnnnnnnnnnnnnnnnnnnnnnnnnnnnnnnnnnnnnnnnnnnnnnnnnnnnnnnnnnnnnnnnnnnnnnnnnnnnnnnnnnnnnnnnnnnnnnnnnnnnnnnnnnnnnnnnnnnnnnnnnnnnnnnnnnnnnnnnnnnnnnnnnnnnnnnnnnnnnnnnnnnnnnnnnnnnnnnnnnnnnnnnnnnnnnnnnnnnnnnnnnnnnnnnnnnnnnnnnnnnnnnnnnnnnnnnnnnnnnnnnnnnnnnnnnnnnnnnnnnnnnnnnnnnnnnnnnnnnnnnnnnnnnnnnnnnnnnnnnnnnnnnnnnnnnnnnnnnnnnnnnnnnnnnnnnnnnnnnnnnnnnnnnnnnnnnnnnnnnnnnnnnnnnnnnnnnnnnnnnnnnnnnnnnnnnnnnnnnnnnnnnnnnnnnnnnnnnnnnnnnnnnnnnnnnnnnnnnnnnnnnnnnnnnnnnnnnnnnnnnnnnnnnnnnnnnnnnnnnnnnnnnnnnnnnnnnnnnnnnnnnnnnnnnnnnnnnnnnnnnnnnnnnnnnnnnnnnnnnnnnnnnnnnnnnnnnnnnnnnnnnnnnnnnnnnnnnnnnnnnnnnnnnnnnnnnnnnnnnnnnnnnnnnnnnnnnnnnnnnnnnnnnnnnnnnnnnnnnnnnnnnnnnnnnnnnnnnnnnnnnnnnnnnnnnnnnnnnnnnnnnnnnnnnnnnnnnnnnnnnnnnnnnnnnnnnnnnnnnnnnnnnnnnnnnnnnnnnnnnnnnnnnnnnnnnnnnnnnnnnnnnnnnnnnnnnnnnnnnnnnnnnnnnnnnnnnnnnnnnnnnnnnnnnnnnnnnnnnnnnnnnnnnnnnnnnnnnnnnnnnnnnnnnnnnnnnnnnnnnnnnnnnnnnnnnnnnnnnnnnnnnnnnnnnnnnnnnnnnnnnnnnnnnnnnnnnnnnnnnnnnnnnnnnnnnnnnnnnnnnnnnnnnnnnnnnnnnnnnnnnnnnnnnnnnnnnnnnnnnnnnnnnnnnnnnnnnnnnnnnnnnnnnnnnnnnnnnnnnnnnnnnnnnnnnnnnnnnnnnnnnnnnnnnnnnnnnnnnnnnnnnnnnnnnnnnnnnnnnnnnnnnnnnnnnnnnnnnnnnnnnnnnnnnnnnnnnnnnnnnnnnnnnnnnnnnnnnnnnnnnnnnnnnnnnnnnnnnnnnnnnnnnnnnnnnnnnnnnnnnnnnnnnnnnnnnnnnnnnnnnnnnnnnnnnnnnnnnnnnnnnnnnnnnnnnnnnnnnnnnnnnnnnnnnnnnnnnnnnnnnnnnnnnnnnnnnnnnnnnnnnnnnnnnnnnnnnnnnnnnnnnnnnnnnnnnnnnnnnnnnnnnnnnnnnnnnnnnnnnnnnnnnnnnnnnnnnnnnnnnnnnnnnnnnnnnnnnnnnnnnnnnnnnnnnnnnnnnnnnnnnnnnnnnnnnnnnnnnnnnnnnnnnnnnnnnnnnnnnnnnnnnnnnnnnnnnnnnnnnnnnnnnnnnnnnnnnnnnnnnnnnnnnnnnnnnnnnnnnnnnnnnnnnnnnnnnnnnnnnnnnnnnnnnnnnnnnnnnnnnnnnnnnnnnnnnnnnnnnnnnnnnnnnnnnnnnnnnnnnnnnnnnnnnnnnnnnnnnnnnnnnnnnnnnnnnnnnnnnnnnnnnnnnnnnnnnnnnnnnnnnnnnnnnnnnnnnnnnnnnnnnnnnnnnnnnnnnnnnnnnnnnnnnnnnnnnnnnnnnnnnnnnnnnnnnnnnnnnnnnnnnnnnnnnnnnnnnnnnnnnnnnnnnnnnnnnnnnnnnnnnnnnnnnnnnnnnnnnnnnnnnnnnnnnnnnnnnnnnnnnnnnnnnnnnnnnnnnnnnnnnnnnnnnnnnnnnnnnnnnnnnnnnnnnnnnnnnnnnnnnnnnnnnnnnnnnnnnnnnnnnnnnnnnnnnnnnnnnnnnnnnnnnnnnnnnnnnnnnnnnnnnnnnnnnnnnnnnnnnnnnnnnnnnnnnnnnnnnnnnnnnnnnnnnnnnnnnnnnnnnnnnnnnnnnnnnnnnnnnnnnnnnnnnnnnnnnnnnnnnnnnnnnnnnnnnnnnnnnnnnnnnnnnnnnnnnnnnnnnnnnnnnnnnnnnnnnnnnnnnnnnnnnnnnnnnnnnnnnnnnnnnnnnnnnnnnnnnnnnnnnnnnnnnnnnnnnnnnnnnnnnnnnnnnnnnnnnnnnnnnnnnnnnnnnnnnnnnnnnnnnnnnnnnnnnnnnnnnnnnnnnnnnnnnnnnnnnnnnnnnnnnnnnnnnnnnnnnnnnnnnnnnnnnnnnnnnnnnnnnnnnnnnnnnnnnnnnnnnnnnnnnnnnnnnnnnnnnnnnnnnnnnnnnnnnnnnnnnnnnnnnnnnnnnnnnnnnnnnnnnnnnnnnnnnnnnnnnnnnnnnnnnnnnnnnnnnnnnnnnnnnnnnnnnnnnnnnnnnnnnnnnnnnnnnnnnnnnnnnnnnnnnnnnnnnnnnnnnnnnnnnnnnnnnnnnnnnnnnnnnnnnnnnnnnnnnnnnnnnnnnnnnnnnnnnnnnnnnnnnnnnnnnnnnnnnnnnnnnnnnnnnnnnnnnnnnnnnnnnnnnnnnnnnnnnnnnnnnnnnnnnnnnnnnnnnnnnnnnnnnnnnnnnnnnnnnnnnnnnnnnnnnnnnnnnnnnnnnnnnnnnnnnnnnnnnnnnnnnnnnnnnnnnnnnnnnnnnnnnnnnnnnnnnnnnnnnnnnnnnnnnnnnnnnnnnnnnnnnnnnnnnnnnnnnnnnnnnnnnnnnnnnnnnnnnnnnnnnnnnnnnnnnnnnnnnnnnnnnnnnnnnnnnnnnnnnnnnnnnnnnnnnnnnnnnnnnnnnnnnnnnnnnnnnnnnnnnnnnnnnnnnnnnnnnnnnnnnnnnnnnnnnnnnnnnnnnnnnnnnnnnnnnnnnnnnnnnnnnnnnnnnnnnnnnnnnnnnnnnnnnnnnnnnnnnnnnnnnnnnnnnnnnnnnnnnnnnnnnnnnnnnnnnnnnnnnnnnnnnnnnnnnnnnnnnnnnnnnnnnnnnnnnnnnnnnnnnnnnnnnnnnnnnnnnnnnnnnnnnnnnnnnnnnnnnnnnnnnnnnnnnnnnnnnnnnnnnnnnnnnnnnnnnnnnnnnnnnnnnnnnnnnnnnnnnnnnnnnnnnnnnnnnnnnnnnnnnnnnnnnnnnnnnnnnnnnnnnnnnnnnnnnnnnnnnnnnnnnnnnnnnnnnnnnnnnnnnnnnnnnnnnnnnnnnnnnnnnnnnnnnnnnnnnnnnnnnnnnnnnnnnnnnnnnnnnnnnnnnnnnnnnnnnnnnnnnnnnnnnnnnnnnnnnnnnnnnnnnnnnnnnnnnnnnnnnnnnnnnnnnnnnnnnnnnnnnnnnnnnnnnnnnnnnnnnnnnnnnnnnnnnnnnnnnnnnnnnnnnnnnnnnnnnnnnnnnnnnnnnnnnnnnnnnnnnnnnnnnnnnnnnnnnnnnnnnnnnnnnnnnnnnnnnnnnnnnnnnnnnnnnnnnnnnnnnnnnnnnnnnnnnnnnnnnnnnnnnnnnnnnnnnnnnnnnnnnnnnnnnnnnnnnnnnnnnnnnnnnnnnnnnnnnnnnnnnnnnnnnnnnnnnnnnnnnnnnnnnnnnnnnnnnnnnnnnnnnnnnnnnnnnnnnnnnnnnnnnnnnnnnnnnnnnnnnnnnnnnnnnnnnnnnnnnnnnnnnnnnnnnnnnnnnnnnnnnnnnnnnnnnnnnnnnnnnnnnnnnnnnnnnnnnnnnnnnnnnnnnnnnnnnnnnnnnnnnnnnnnnnnnnnnnnnnnnnnnnnnnnnnnnnnnnnnnnnnnnnnnnnnnnnnnnnnnnnnnnnnnnnnnnnnnnnnnnnnnnnnnnnnnnnnnnnnnnnnnnnnnnnnnnnnnnnnnnnnnnnnnnnnnnnnnnnnnnnnnnnnnnnnnnnnnnnnnnnnnnnnnnnnnnnnnnnnnnnnnnnnnnnnnnnnnnnnnnnnnnnnnnnnnnnnnnnnnnnnnnnnnnnnnnnnnnnnnnnnnnnnnnnnnnnnnnnnnnnnnnnnnnnnnnnnnnnnnnnnnnnnnnnnnnnnnnnnnnnnnnnnnnnnnnnnnnnnnnnnnnnnnnnnnnnnnnnnnnnnnnnnnnnnnnnnnnnnnnnnnnnnnnnnnnnnnnnnnnnnnnnnnnnnnnnnnnnnnnnnnnnnnnnnnnnnnnnnnnnnnnnnnnnnnnnnnnnnnnnnnnnnnnnnnnnnnnnnnnnnnnnnnnnnnnnnnnnnnnnnnnnnnnnnnnnnnnnnnnnnnnnnnnnnnnnnnnnnnnnnnnnnnnnnnnnnnnnnnnnnnnnnnnnnnnnnnnnnnnnnnnnnnnnnnnnnnnnnnnnnnnnnnnnnnnnnnnnnnnnnnnnnnnnnnnnnnnnnnnnnnnnnnnnnnnnnnnnnnnnnnnnnnnnnnnnnnnnnnnnnnnnnnnnnnnnnnnnnnnnnnnnnnnnnnnnnnnnnnnnnnnnnnnnnnnnnnnnnnnnnnnnnnnnnnnnnnnnnnnnnnnnnnnnnnnnnnnnnnnnnnnnnnnnnnnnnnnnnnnnnnnnnnnnnnnnnnnnnnnnnnnnnnnnnnnnnnnnnnnnnnnnnnnnnnnnnnnnnnnnnnnnnnnnnnnnnnnnnnnnnnnnnnnnnnnnnnnnnnnnnnnnnnnnnnnnnnnnnnnnnnnnnnnnnnnnnnnnnnnnnnnnnnnnnnnnnnnnnnnnnnnnnnnnnnnnnnnnnnnnnnnnnnnnnnnnnnnnnnnnnnnnnnnnnnnnnnnnnnnnnnnnnnnnnnnnnnnnnnnnnnnnnnnnnnnnnnnnnnnnnnnnnnnnnnnnnnnnnnnnnnnnnnnnnnnnnnnnnnnnnnnnnnnnnnnnnnnnnnnnnnnnnnnnnnnnnnnnnnnnnnnnnnnnnnnnnnnnnnnnnnnnnnnnnnnnnnnnnnnnnnnnnnnnnnnnnnnnnnnnnnnnnnnnnnnnnnnnnnnnnnnnnnnnnnnnnnnnnnnnnnnnnnnnnnnnnnnnnnnnnnnnnnnnnnnnnnnnnnnnnnnnnnnnnnnnnnnnnnnnnnnnnnnnnnnnnnnnnnnnnnnnnnnnnnnnnnnnnnnnnnnnnnnnnnnnnnnnnnnnnnnnnnnnnnnnnnnnnnnnnnnnnnnnnnnnnnnnnnnnnnnnnnnnnnnnnnnnnnnnnnnnnnnnnnnnnnnnnnnnnnnnnnnnnnnnnnnnnnnnnnnnnnnnnnnnnnnnnnnnnnnnnnnnnnnnnnnnnnnnnnnnnnnnnnnnnnnnnnnnnnnnnnnnnnnnnnnnnnnnnnnnnnnnnnnnnnnnnnnnnnnnnnnnnnnnnnnnnnnnnnnnnnnnnnnnnnnnnnnnnnnnnnnnnnnnnnnnnnnnnnnnnnnnnnnnnnnnnnnnnnnnnnnnnnnnnnnnnnnnnnnnnnnnnnnnnnnnnnnnnnnnnnnnnnnnnnnnnnnnnnnnnnnnnnnnnnnnnnnnnnnnnnnnnnnnnnnnnnnnnnnnnnnnnnnnnnnnnnnnnnnnnnnnnnnnnnnnnnnnnnnnnnnnnnnnnnnnnnnnnnnnnnnnnnnnnnnnnnnnnnnnnnnnnnnnnnnnnnnnnnnnnnnnnnnnnnnnnnnnnnnnnnnnnnnnnnnnnnnnnnnnnnnnnnnnnnnnnnnnnnnnnnnnnnnnnnnnnnnnnnnnnnnnnnnnnnnnnnnnnnnnnnnnnnnnnnnnnnnnnnnnnnnnnnnnnnnnnnnnnnnnnnnnnnnnnnnnnnnnnnnnnnnnnnnnnnnnnnnnnnnnnnnnnnnnnnnnnnnnnnnnnnnnnnnnnnnnnnnnnnnnnnnnnnnnnnnnnnnnnnnnnnnnnnnnnnnnnnnnnnnnnnnnnnnnnnnnnnnnnnnnnnnnnnnnnnnnnnnnnnnnnnnnnnnnnnnnnnnnnnnnnnnnnnnnnnnnnnnnnnnnnnnnnnnnnnnnnnnnnnnnnnnnnnnnnnnnnnnnnnnnnnnnnnnnnnnnnnnnnnnnnnnnnnnnnnnnnnnnnnnnnnnnnnnnnnnnnnnnnnnnnnnnnnnnnnnnnnnnnnnnnnnnnnnnnnnnnnnnnnnnnnnnnnnnnnnnnnnnnnnnnnnnnnnnnnnnnnnnnnnnnnnnnnnnnnnnnnnnnnnnnnnnnnnnnnnnnnnnnnnnnnnnnnnnnnnnnnnnnnnnnnnnnnnnnnnnnnnnnnnnnnnnnnnnnnnnnnnnnnnnnnnnnnnnnnnnnnnnnnnnnnnnnnnnnnnnnnnnnnnnnnnnnnnnnnnnnnnnnnnnnnnnnnnnnnnnnnnnnnnnnnnnnnnnnnnnnnnnnnnnnnnnnnnnnnnnnnnnnnnnnnnnnnnnnnnnnnnnnnnnnnnnnnnnnnnnnnnnnnnnnnnnnnnnnnnnnnnnnnnnnnnnnnnnnnnnnnnnnnnnnnnnnnnnnnnnnnnnnnnnnnnnnnnnnnnnnnnnnnnnnnnnnnnnnnnnnnnnnnnnnnnnnnnnnnnnnnnnnnnnnnnnnnnnnnnnnnnnnnnnnnnnnnnnnnnnnnnnnnnnnnnnnnnnnnnnnnnnnnnnnnnnnnnnnnnnnnnnnnnnnnnnnnnnnnnnnnnnnnnnnnnnnnnnnnnnnnnnnnnnnnnnnnnnnnnnnnnnnnnnnnnnnnnnnnnnnnnnnnnnnnnnnnnnnnnnnnnnnnnnnnnnnnnnnnnnnnnnnnnnnnnnnnnnnnnnnnnnnnnnnnnnnnnnnnnnnnnnnnnnnnnnnnnnnnnnnnnnnnnnnnnnnnnnnnnnnnnnnnnnnnnnnnnnnnnnnnnnnnnnnnnnnnnnnnnnnnnnnnnnnnnnnnnnnnnnnnnnnnnnnnnnnnnnnnnnnnnnnnnnnnnnnnnnnnnnnnnnnnnnnnnnnnnnnnnnnnnnnnnnnnnnnnnnnnnnnnnnnnnnnnnnnnnnnnnnnnnnnnnnnnnnnnnnnnnnnnnnnnnnnnnnnnnnnnnnnnnnnnnnnnnnnnnnnnnnnnnnnnnnnnnnnnnnnnnnnnnnnnnnnnnnnnnnnnnnnnnnnnnnnnnnnnnnnnnnnnnnnnnnnnnnnnnnnnnnnnnnnnnnnnnnnnnnnnnnnnnnnnnnnnnnnnnnnnnnnnnnnnnnnnnnnnnnnnnnnnnnnnnnnnnnnnnnnnnnnnnnnnnnnnnnnnnnnnnnnnnnnnnnnnnnnnnnnnnnnnnnnnnnnnnnnnnnnnnnnnnnnnnnnnnnnnnnnnnnnnnnnnnnnnnnnnnnnnnnnnnnnnnnnnnnnnnnnnnnnnnnnnnnnnnnnnnnnnnnnnnnnnnnnnnnnnnnnnnnnnnnnnnnnnnnnnnnnnnnnnnnnnnnnnnnnnnnnnnnnnnnnnnnnnnnnnnnnnnnnnnnnnnnnnnnnnnnnnnnnnnnnnnnnnnnnnnnnnnnnnnnnnnnnnnnnnnnnnnnnnnnnnnnnnnnnnnnnnnnnnnnnnnnnnnnnnnnnnnnnnnnnnnnnnnnnnnnnnnnnnnnnnnnnnnnnnnnnnnnnnnnnnnnnnnnnnnnnnnnnnnnnnnnnnnnnnnnnnnnnnnnnnnnnnnnnnnnnnnnnnnnnnnnnnnnnnnnnnnnnnnnnnnnnnnnnnnnnnnnnnnnnnnnnnnnnnnnnnnnnnnnnnnnnnnnnnnnnnnnnnnnnnnnnnnnnnnnnnnnnnnnnnnnnnnnnnnnnnnnnnnnnnnnnnnnnnnnnnnnnnnnnnnnnnnnnnnnnnnnnnnnnnnnnnnnnnnnnnnnnnnnnnnnnnnnnnnnnnnnnnnnnnnnnnnnnnnnnnnnnnnnnnnnnnnnnnnnnnnnnnnnnnnnnnnnnnnnnnnnnnnnnnnnnnnnnnnnnnnnnnnnnnnnnnnnnnnnnnnnnnnnnnnnnnnnnnnnnnnnnnnnnnnnnnnnnnnnnnnnnnnnnnnnnnnnnnnnnnnnnnnnnnnnnnnnnnnnnnnnnnnnnnnnnnnnnnnnnnnnnnnnnnnnnnnnnnnnnnnnnnnnnnnnnnnnnnnnnnnnnnnnnnnnnnnnnnnnnnnnnnnnnnnnnnnnnnnnnnnnnnnnnnnnnnnnnnnnnnnnnnnnnnnnnnnnnnnnnnnnnnnnnnnnnnnnnnnnnnnnnnnnnnnnnnnnnnnnnnnnnnnnnnnnnnnnnnnnnnnnnnnnnnnnnnnnnnnnnnnnnnnnnnnnnnnnnnnnnnnnnnnnnnnnnnnnnnnnnnnnnnnnnnnnnnnnnnnnnnnnnnnnnnnnnnnnnnnnnnnnnnnnnnnnnnnnnnnnnnnnnnnnnnnnnnnnnnnnnnnnnnnnnnnnnnnnnnnnnnnnnnnnnnnnnnnnnnnnnnnnnnnnnnnnnnnnnnnnnnnnnnnnnnnnnnnnnnnnnnnnnnnnnnnnnnnnnnnnnnnnnnnnnnnnnnnnnnnnnnnnnnnnnnnnnnnnnnnnnnnnnnnnnnnnnnnnnnnnnnnnnnnnnnnnnnnnnnnnnnnnnnnnnnnnnnnnnnnnnnnnnnnnnnnnnnnnnnnnnnnnnnnnnnnnnnnnnnnnnnnnnnnnnnnnnnnnnnnnnnnnnnnnnnnnnnnnnnnnnnnnnnnnnnnnnnnnnnnnnnnnnnnnnnnnnnnnnnnnnnnnnnnnnnnnnnnnnnnnnnnnnnnnnnnnnnnnnnnnnnnnnnnnnnnnnnnnnnnnnnnnnnnnnnnnnnnnnnnnnnnnnnnnnnnnnnnnnnnnnnnnnnnnnnnnnnnnnnnnnnnnnnnnnnnnnnnnnnnnnnnnnnnnnnnnnnnnnnnnnnnnnnnnnnnnnnnnnnnnnnnnnnnnnnnnnnnnnnnnnnnnnnnnnnnnnnnnnnnnnnnnnnnnnnnnnnnnnnnnnnnnnnnnnnnnnnnnnnnnnnnnnnnnnnnnnnnnnnnnnnnnnnnnnnnnnnnnnnnnnnnnnnnnnnnnnnnnnnnnnnnnnnnnnnnnnnnnnnnnnnnnnnnnnnnnnnnnnnnnnnnnnnnnnnnnnnnnnnnnnnnnnnnnnnnnnnnnnnnnnnnnnnnnnnnnnnnnnnnnnnnnnnnnnnnnnnnnnnnnnnnnnnnnnnnnnnnnnnnnnnnnnnnnnnnnnnnnnnnnnnnnnnnnnnnnnnnnnnnnnnnnnnnnnnnnnnnnnnnnnnnnnnnnnnnnnnnnnnnnnnnnnnnnnnnnnnnnnnnnnnnnnnnnnnnnnnnnnnnnnnnnnnnnnnnnnnnnnnnnnnnnnnnnnnnnnnnnnnnnnnnnnnnnnnnnnnnnnnnnnnnnnnnnnnnnnnnnnnnnnnnnnnnnnnnnnnnnnnnnnnnnnnnnnnnnnnnnnnnnnnnnnnnnnnnnnnnnnnnnnnnnnnnnnnnnnnnnnnnnnnnnnnnnnnnnnnnnnnnnnnnnnnnnnnnnnnnnnnnnnnnnnnnnnnnnnnnnnnnnnnnnnnnnnnnnnnnnnnnnnnnnnnnnnnnnnnnnnnnnnnnnnnnnnnnnnnnnnnnnnnnnnnnnnnnnnnnnnnnnnnnnnnnnnnnnnnnnnnnnnnnnnnnnnnnnnnnnnnnnnnnnnnnnnnnnnnnnnnnnnnnnnnnnnnnnnnnnnnnnnnnnnnnnnnnnnnnnnnnnnnnnnnnnnnnnnnnnnnnnnnnnnnnnnnnnnnnnnnnnnnnnnnnnnnnnnnnnnnnnnnnnnnnnnnnnnnnnnnnnnnnnnnnnnnnnnnnnnnnnnnnnnnnnnnnnnnnnnnnnnnnnnnnnnnnnnnnnnnnnnnnnnnnnnnnnnnnnnnnnnnnnnnnnnnnnnnnnnnnnnnnnnnnnnnnnnnnnnnnnnnnnnnnnnnnnnnnnnnnnnnnnnnnnnnnnnnnnnnnnnnnnnnnnnnnnnnnnnnnnnnnnnnnnnnnnnnnnnnnnnnnnnnnnnnnnnnnnnnnnnnnnnnnnnnnnnnnnnnnnnnnnnnnnnnnnnnnnnnnnnnnnnnnnnnnnnnnnnnnnnnnnnnnnnnnnnnnnnnnnnnnnnnnnnnnnnnnnnnnnnnnnnnnnnnnnnnnnnnnnnnnnnnnnnnnnnnnnnnnnnnnnnnnnnnnnnnnnnnnnnnnnnnnnnnnnnnnnnnnnnnnnnnnnnnnnnnnnnnnnnnnnnnnnnnnnnnnnnnnnnnnnnnnnnnnnnnnnnnnnnnnnnnnnnnnnnnnnnnnnnnnnnnnnnnnnnnnnnnnnnnnnnnnnnnnnnnnnnnnnnnnnnnnnnnnnnnnnnnnnnnnnnnnnnnnnnnnnnnnnnnnnnnnnnnnnnnnnnnnnnnnnnnnnnnnnnnnnnnnnnnnnnnnnnnnnnnnnnnnnnnnnnnnnnnnnnnnnnnnnnnnnnnnnnnnnnnnnnnnnnnnnnnnnnnnnnnnnnnnnnnnnnnnnnnnnnnnnnnnnnnnnnnnnnnnnnnnnnnnnnnnnnnnnnnnnnnnnnnnnnnnnnnnnnnnnnnnnnnnnnnnnnnnnnnnnnnnnnnnnnnnnnnnnnnnnnnnnnnnnnnnnnnnnnnnnnnnnnnnnnnnnnnnnnnnnnnnnnnnnnnnnnnnnnnnnnnnnnnnnnnnnnnnnnnnnnnnnnnnnnnnnnnnnnnnnnnnnnnnnnnnnnnnnnnnnnnnnnnnnnnnnnnnnnnnnnnnnnnnnnnnnnnnnnnnnnnnnnnnnnnnnnnnnnnnnnnnnnnnnnnnnnnnnnnnnnnnnnnnnnnnnnnnnnnnnnnnnnnnnnnnnnnnnnnnnnnnnnnnnnnnnnnnnnnnnnnnnnnnnnnnnnnnnnnnnnnnnnnnnnnnnnnnnnnnnnnnnnnnnnnnnnnnnnnnnnnnnnnnnnnnnnnnnnnnnnnnnnnnnnnnnnnnnnnnnnnnnnnnnnnnnnnnnnnnnnnnnnnnnnnnnnnnnnnnnnnnnnnnnnnnnnnnnnnnnnnnnnnnnnnnnnnnnnnnnnnnnnnnnnnnnnnnnnnnnnnnnnnnnnnnnnnnnnnnnnnnnnnnnnnnnnnnnnnnnnnnnnnnnnnnnnnnnnnnnnnnnnnnnnnnnnnnnnnnnnnnnnnnnnnnnnnnnnnnnnnnnnnnnnnnnnnnnnnnnnnnnnnnnnnnnnnnnnnnnnnnnnnnnnnnnnnnnnnnnnnnnnnnnnnnnnnnnnnnnnnnnnnnnnnnnnnnnnnnnnnnnnnnnnnnnnnnnnnnnnnnnnnnnnnnnnnnnnnnnnnnnnnnnnnnnnnnnnnnnnnnnnnnnnnnnnnnnnnnnnnnnnnnnnnnnnnnnnnnnnnnnnnnnnnnnnnnnnnnnnnnnnnnnnnnnnnnnnnnnnnnnnnnnnnnnnnnnnnnnnnnnnnnnnnnnnnnnnnnnnnnnnnnnnnnnnnnnnnnnnnnnnnnnnnnnnnnnnnnnnnnnnnnnnnnnnnnnnnnnnnnnnnnnnnnnnnnnnnnnnnnnnnnnnnnnnnnnnnnnnnnnnnnnnnnnnnnnnnnnnnnnnnnnnnnnnnnnnnnnnnnnnnnnnnnnnnnnnnnnnnnnnnnnnnnnnnnnnnnnnnnnnnnnnnnnnnnnnnnnnnnnnnnnnnnnnnnnnnnnnnnnnnnnnnnnnnnnnnnnnnnnnnnnnnnnnnnnnnnnnnnnnnnnnnnnnnnnnnnnnnnnnnnnnnnnnnnnnnnnnnnnnnnnnnnnnnnnnnnnnnnnnnnnnnnnnnnnnnnnnnnnnnnnnnnnnnnnnnnnnnnnnnnnnnnnnnnnnnnnnnnnnnnnnnnnnnnnnnnnnnnnnnnnnnnnnnnnnnnnnnnnnnnnnnnnnnnnnnnnnnnnnnnnnnnnnnnnnnnnnnnnnnnnnnnnnnnnnnnnnnnnnnnnnnnnnnnnnnnnnnnnnnnnnnnnnnnnnnnnnnnnnnnnnnnnnnnnnnnnnnnnnnnnnnnnnnnnnnnnnnnnnnnnnnnnnnnnnnnnnnnnnnnnnnnnnnnnnnnnnnnnnnnnnnnnnnnnnnnnnnnnnnnnnnnnnnnnnnnnnnnnnnnnnnnnnnnnnnnnnnnnnnnnnnnnnnnnnnnnnnnnnnnnnnnnnnnnnnnnnnnnnnnnnnnnnnnnnnnnnnnnnnnnnnnnnnnnnnnnnnnnnnnnnnnnnnnnnnnnnnnnnnnnnnnnnnnnnnnnnnnnnnnnnnnnnnnnnnnnnnnnnnnnnnnnnnnnnnnnnnnnnnnnnnnnnnnnnnnnnnnnnnnnnnnnnnnnnnnnnnnnnnnnnnnnnnnnnnnnnnnnnnnnnnnnnnnnnnnnnnnnnnnnnnnnnnnnnnnnnnnnnnnnnnnnnnnnnnnnnnnnnnnnnnnnnnnnnnnnnnnnnnnnnnnnnnnnnnnnnnnnnnnnnnnnnnnnnnnnnnnnnnnnnnnnnnnnnnnnnnnnnnnnnnnnnnnnnnnnnnnnnnnnnnnnnnnnnnnnnnnnnnnnnnnnnnnnnnnnnnnnnnnnnnnnnnnnnnnnnnnnnnnnnnnnnnnnnnnnnnnnnnnnnnnnnnnnnnnnnnnnnnnnnnnnnnnnnnnnnnnnnnnnnnnnnnnnnnnnnnnnnnnnnnnnnnnnnnnnnnnnnnnnnnnnnnnnnnnnnnnnnnnnnnnnnnnnnnnnnnnnnnnnnnnnnnnnnnnnnnnnnnnnnnnnnnnnnnnnnnnnnnnnnnnnnnnnnnnnnnnnnnnnnnnnnnnnnnnnnnnnnnnnnnnnnnnnnnnnnnnnnnnnnnnnnnnnnnnnnnnnnnnnnnnnnnnnnnnnnnnnnnnnnnnnnnnnnnnnnnnnnnnnnnnnnnnnnnnnnnnnnnnnnnnnnnnnnnnnnnnnnnnnnnnnnnnnnnnnnnnnnnnnnnnnnnnnnnnnnnnnnnnnnnnnnnnnnnnnnnnnnnnnnnnnnnnnnnnnnnnnnnnnnnnnnnnnnnnnnnnnnnnnnnnnnnnnnnnnnnnnnnnnnnnnnnnnnnnnnnnnnnnnnnnnnnnnnnnnnnnnnnnnnnnnnnnnnnnnnnnnnnnnnnnnnnnnnnnnnnnnnnnnnnnnnnnnnnnnnnnnnnnnnnnnnnnnnnnnnnnnnnnnnnnnnnnnnnnnnnnnnnnnnnnnnnnnnnnnnnnnnnnnnnnnnnnnnnnnnnnnnnnnnnnnnnnnnnnnnnnnnnnnnnnnnnnnnnnnnnnnnnnnnnnnnnnnnnnnnnnnnnnnnnnnnnnnnnnnnnnnnnnnnnnnnnnnnnnnnnnnnnnnnnnnnnnnnnnnnnnnnnnnnnnnnnnnnnnnnnnnnnnnnnnnnnnnnnnnnnnnnnnnnnnnnnnnnnnnnnnnnnnnnnnnnnnnnnnnnnnnnnnnnnnnnnnnnnnnnnnnnnnnnnnnnnnnnnnnnnnnnnnnnnnnnnnnnnnnnnnnnnnnnnnnnnnnnnnnnnnnnnnnnnnnnnnnnnnnnnnnnnnnnnnnnnnnnnnnnnnnnnnnnnnnnnnnnnnnnnnnnnnnnnnnnnnnnnnnnnnnnnnnnnnnnnnnnnnnnnnnnnnnnnnnnnnnnnnnnnnnnnnnnnnnnnnnnnnnnnnnnnnnnnnnnnnnnnnnnnnnnnnnnnnnnnnnnnnnnnnnnnnnnnnnnnnnnnnnnnnnnnnnnnnnnnnnnnnnnnnnnnnnnnnnnnnnnnnnnnnnnnnnnnnnnnnnnnnnnnnnnnnnnnnnnnnnnnnnnnnnnnnnnnnnnnnnnnnnnnnnnnnnnnnnnnnnnnnnnnnnnnnnnnnnnnnnnnnnnnnnnnnnnnnnnnnnnnnnnnnnnnnnnnnnnnnnnnnnnnnnnnnnnnnnnnnnnnnnnnnnnnnnnnnnnnnnnnnnnnnnnnnnnnnnnnnnnnnnnnnnnnnnnnnnnnnnnnnnnnnnnnnnnnnnnnnnnnnnnnnnnnnnnnnnnnnnnnnnnnnnnnnnnnnnnnnnnnnnnnnnnnnnnnnnnnnnnnnnnnnnnnnnnnnnnnnnnnnnnnnnnnnnnnnnnnnnnnnnnnnnnnnnnnnnnnnnnnnnnnnnnnnnnnnnnnnnnnnnnnnnnnnnnnnnnnnnnnnnnnnnnnnnnnnnnnnnnnnnnnnnnnnnnnnnnnnnnnnnnnnnnnnnnnnnnnnnnnnnnnnnnnnnnnnnnnnnnnnnnnnnnnnnnnnnnnnnnnnnnnnnnnnnnnnnnnnnnnnnnnnnnnnnnnnnnnnnnnnnnnnnnnnnnnnnnnnnnnnnnnnnnnnnnnnnnnnnnnnnnnnnnnnnnnnnnnnnnnnnnnnnnnnnnnnnnnnnnnnnnnnnnnnnnnnnnnnnnnnnnnnnnnnnnnnnnnnnnnnnnnnnnnnnnnnnnnnnnnnnnnnnnnnnnnnnnnnnnnnnnnnnnnnnnnnnnnnnnnnnnnnnnnnnnnnnnnnnnnnnnnnnnnnnnnnnnnnnnnnnnnnnnnnnnnnnnnnnnnnnnnnnnnnnnnnnnnnnnnnnnnnnnnnnnnnnnnnnnnnnnnnnnnnnnnnnnnnnnnnnnnnnnnnnnnnnnnnnnnnnnnnnnnnnnnnnnnnnnnnnnnnnnnnnnnnnnnnnnnnnnnnnnnnnnnnnnnnnnnnnnnnnnnnnnnnnnnnnnnnnnnnnnnnnnnnnnnnnnnnnnnnnnnnnnnnnnnnnnnnnnnnnnnnnnnnnnnnnnnnnnnnnnnnnnnnnnnnnnnnnnnnnnnnnnnnnnnnnnnnnnnnnnnnnnnnnnnnnnnnnnnnnnnnnnnnnnnnnnnnnnnnnnnnnnnnnnnnnnnnnnnnnnnnnnnnnnnnnnnnnnnnnnnnnnnnnnnnnnnnnnnnnnnnnnnnnnnnnnnnnnnnnnnnnnnnnnnnnnnnnnnnnnnnnnnnnnnnnnnnnnnnnnnnnnnnnnnnnnnnnnnnnnnnnnnnnnnnnnnnnnnnnnnnnnnnnnnnnnnnnnnnnnnnnnnnnnnnnnnnnnnnnnnnnnnnnnnnnnnnnnnnnnnnnnnnnnnnnnnnnnnnnnnnnnnnnnnnnnnnnnnnnnnnnnnnnnnnnnnnnnnnnnnnnnnnnnnnnnnnnnnnnnnnnnnnnnnnnnnnnnnnnnnnnnnnnnnnnnnnnnnnnnnnnnnnnnnnnnnnnnnnnnnnnnnnnnnnnnnnnnnnnnnnnnnnnnnnnnnnnnnnnnnnnnnnnnnnnnnnnnnnnnnnnnnnnnnnnnnnnnnnnnnnnnnnnnnnnnnnnnnnnnnnnnnnnnnnnnnnnnnnnnnnnnnnnnnnnnnnnnnnnnnnnnnnnnnnnnnnnnnnnnnnnnnnnnnnnnnnnnnnnnnnnnnnnnnnnnnnnnnnnnnnnnnnnnnnnnnnnnnnnnnnnnnnnnnnnnnnnnnnnnnnnnnnnnnnnnnnnnnnnnnnnnnnnnnnnnnnnnnnnnnnnnnnnnnnnnnnnnnnnnnnnnnnnnnnnnnnnnnnnnnnnnnnnnnnnnnnnnnnnnnnnnnnnnnnnnnnnnnnnnnnnnnnnnnnnnnnnnnnnnnnnnnnnnnnnnnnnnnnnnnnnnnnnnnnnnnnnnnnnnnnnnnnnnnnnnnnnnnnnnnnnnnnnnnnnnnnnnnnnnnnnnnnnnnnnnnnnnnnnnnnnnnnnnnnnnnnnnnnnnnnnnnnnnnnnnnnnnnnnnnnnnnnnnnnnnnnnnnnnnnnnnnnnnnnnnnnnnnnnnnnnnnnnnnnnnnnnnnnnnnnnnnnnnnnnnnnnnnnnnnnnnnnnnnnnnnnnnnnnnnnnnnnnnnnnnnnnnnnnnnnnnnnnnnnnnnnnnnnnnnnnnnnnnnnnnnnnnnnnnnnnnnnnnnnnnnnnnnnnnnnnnnnnnnnnnnnnnnnnnnnnnnnnnnnnnnnnnnnnnnnnnnnnnnnnnnnnnnnnnnnnnnnnnnnnnnnnnnnnnnnnnnnnnnnnnnnnnnnnnnnnnnnnnnnnnnnnnnnnnnnnnnnnnnnnnnnnnnnnnnnnnnnnnnnnnnnnnnnnnnnnnnnnnnnnnnnnnnnnnnnnnnnnnnnnnnnnnnnnnnnnnnnnnnnnnnnnnnnnnnnnnnnnnnnnnnnnnnnnnnnnnnnnnnnnnnnnnnnnnnnnnnnnnnnnnnnnnnnnnnnnnnnnnnnnnnnnnnnnnnnnnnnnnnnnnnnnnnnnnnnnnnnnnnnnnnnnnnnnnnnnnnnnnnnnnnnnnnnnnnnnnnnnnnnnnnnnnnnnnnnnnnnnnnnnnnnnnnnnnnnnnnnnnnnnnnnnnnnnnnnnnnnnnnnnnnnnnnnnnnnnnnnnnnnnnnnnnnnnnnnnnnnnnnnnnnnnnnnnnnnnnnnnnnnnnnnnnnnnnnnnnnnnnnnnnnnnnnnnnnnnnnnnnnnnnnnnnnnnnnnnnnnnnnnnnnnnnnnnnnnnnnnnnnnnnnnnnnnnnnnnnnnnnnnnnnnnnnnnnnnnnnnnnnnnnnnnnnnnnnnnnnnnnnnnnnnnnnnnnnnnnnnnnnnnnnnnnnnnnnnnnnnnnnnnnnnnnnnnnnnnnnnnnnnnnnnnnnnnnnnnnnnnnnnnnnnnnnnnnnnnnnnnnnnnnnnnnnnnnnnnnnnnnnnnnnnnnnnnnnnnnnnnnnnnnnnnnnnnnnnnnnnnnnnnnnnnnnnnnnnnnnnnnnnnnnnnnnnnnnnnnnnnnnnnnnnnnnnnnnnnnnnnnnnnnnnnnnnnnnnnnnnnnnnnnnnnnnnnnnnnnnnnnnnnnnnnnnnnnnnnnnnnnnnnnnnnnnnnnnnnnnnnnnnnnnnnnnnnnnnnnnnnnnnnnnnnnnnnnnnnnnnnnnnnnnnnnnnnnnnnnnnnnnnnnnnnnnnnnnnnnnnnnnnnnnnnnnnnnnnnnnnnnnnnnnnnnnnnnnnnnnnnnnnnnnnnnnnnnnnnnnnnnnnnnnnnnnnnnnnnnnnnnnnnnnnnnnnnnnnnnnnnnnnnnnnnnnnnnnnnnnnnnnnnnnnnnnnnnnnnnnnnnnnnnnnnnnnnnnnnnnnnnnnnnnnnnnnnnnnnnnnnnnnnnnnnnnnnnnnnnnnnnnnnnnnnnnnnnnnnnnnnnnnnnnnnnnnnnnnnnnnnnnnnnnnnnnnnnnnnnnnnnnnnnnnnnnnnnnnnnnnnnnnnnnnnnnnnnnnnnnnnnnnnnnnnnnnnnnnnnnnnnnnnnnnnnnnnnnnnnnnnnnnnnnnnnnnnnnnnnnnnnnnnnnnnnnnnnnnnnnnnnnnnnnnnnnnnnnnnnnnnnnnnnnnnnnnnnnnnnnnnnnnnnnnnnnnnnnnnnnnnnnnnnnnnnnnnnnnnnnnnnnnnnnnnnnnnnnnnnnnnnnnnnnnnnnnnnnnnnnnnnnnnnnnnnnnnnnnnnnnnnnnnnnnnnnnnnnnnnnnnnnnnnnnnnnnnnnnnnnnnnnnnnnnnnnnnnnnnnnnnnnnnnnnnnnnnnnnnnnnnnnnnnnnnnnnnnnnnnnnnnnnnnnnnnnnnnnnnnnnnnnnnnnnnnnnnnnnnnnnnnnnnnnnnnnnnnnnnnnnnnnnnnnnnnnnnnnnnnnnnnnnnnnnnnnnnnnnnnnnnnnnnnnnnnnnnnnnnnnnnnnnnnnnnnnnnnnnnnnnnnnnnnnnnnnnnnnnnnnnnnnnnnnnnnnnnnnnnnnnnnnnnnnnnnnnnnnnnnnnnnnnnnnnnnnnnnnnnnnnnnnnnnnnnnnnnnnnnnnnnnnnnnnnnnnnnnnnnnnnnnnnnnnnnnnnnnnnnnnnnnnnnnnnnnnnnnnnnnnnnnnnnnnnnnnnnnnnnnnnnnnnnnnnnnnnnnnnnnnnnnnnnnnnnnnnnnnnnnnnnnnnnnnnnnnnnnnnnnnnnnnnnnnnnnnnnnnnnnnnnnnnnnnnnnnnnnnnnnnnnnnnnnnnnnnnnnnnnnnnnnnnnnnnnnnnnnnnnnnnnnnnnnnnnnnnnnnnnnnnnnnnnnnnnnnnnnnnnnnnnnnnnnnnnnnnnnnnnnnnnnnnnnnnnnnnnnnnnnnnnnnnnnnnnnnnnnnnnnnnnnnnnnnnnnnnnnnnnnnnnnnnnnnnnnnnnnnnnnnnnnnnnnnnnnnnnnnnnnnnnnnnnnnnnnnnnnnnnnnnnnnnnnnnnnnnnnnnnnnnnnnnnnnnnnnnnnnnnnnnnnnnnnnnnnnnnnnnnnnnnnnnnnnnnnnnnnnnnnnnnnnnnnnnnnnnnnnnnnnnnnnnnnnnnnnnnnnnnnnnnnnnnnnnnnnnnnnnnnnnnnnnnnnnnnnnnnnnnnnnnnnnnnnnnnnnnnnnnnnnnnnnnnnnnnnnnnnnnnnnnnnnnnnnnnnnnnnnnnnnnnnnnnnnnnnnnnnnnnnnnnnnnnnnnnnnnnnnnnnnnnnnnnnnnnnnnnnnnnnnnnnnnnnnnnnnnnnnnnnnnnnnnnnnnnnnnnnnnnnnnnnnnnnnnnnnnnnnnnnnnnnnnnnnnnnnnnnnnnnnnnnnnnnnnnnnnnnnnnnnnnnnnnnnnnnnnnnnnnnnnnnnnnnnnnnnnnnnnnnnnnnnnnnnnnnnnnnnnnnnnnnnnnnnnnnnnnnnnnnnnnnnnnnnnnnnnnnnnnnnnnnnnnnnnnnnnnnnnnnnnnnnnnnnnnnnnnnnnnnnnnnnnnnnnnnnnnnnnnnnnnnnnnnnnnnnnnnnnnnnnnnnnnnnnnnnnnnnnnnnnnnnnnnnnnnnnnnnnnnnnnnnnnnnnnnnnnnnnnnnnnnnnnnnnnnnnnnnnnnnnnnnnnnnnnnnnnnnnnnnnnnnnnnnnnnnnnnnnnnnnnnnnnnnnnnnnnnnnnnnnnnnnnnnnnnnnnnnnnnnnnnnnnnnnnnnnnnnnnnnnnnnnnnnnnnnnnnnnnnnnnnnnnnnnnnnnnnnnnnnnnnnnnnnnnnnnnnnnnnnnnnnnnnnnnnnnnnnnnnnnnnnnnnnnnnnnnnnnnnnnnnnnnnnnnnnnnnnnnnnnnnnnnnnnnnnnnnnnnnnnnnnnnnnnnnnnnnnnnnnnnnnnnnnnnnnnnnnnnnnnnnnnnnnnnnnnnnnnnnnnnnnnnnnnnnnnnnnnnnnnnnnnnnnnnnnnnnnnnnnnnnnnnnnnnnnnnnnnnnnnnnnnnnnnnnnnnnnnnnnnnnnnnnnnnnnnnnnnnnnnnnnnnnnnnnnnnnnnnnnnnnnnnnnnnnnnnnnnnnnnnnnnnnnnnnnnnnnnnnnnnnnnnnnnnnnnnnnnnnnnnnnnnnnnnnnnnnnnnnnnnnnnnnnnnnnnnnnnnnnnnnnnnnnnnnnnnnnnnnnnnnnnnnnnnnnnnnnnnnnnnnnnnnnnnnnnnnnnnnnnnnnnnnnnnnnnnnnnnnnnnnnnnnnnnnnnnnnnnnnnnnnnnnnnnnnnnnnnnnnnnnnnnnnnnnnnnnnnnnnnnnnnnnnnnnnnnnnnnnnnnnnnnnnnnnnnnnnnnnnnnnnnnnnnnnnnnnnnnnnnnnnnnnnnnnnnnnnnnnnnnnnnnnnnnnnnnnnnnnnnnnnnnnnnnnnnnnnnnnnnnnnnnnnnnnnnnnnnnnnnnnnnnnnnnnnnnnnnnnnnnnnnnnnnnnnnnnnnnnnnnnnnnnnnnnnnnnnnnnnnnnnnnnnnnnnnnnnnnnnnnnnnnnnnnnnnnnnnnnnnnnnnnnnnnnnnnnnnnnnnnnnnnnnnnnnnnnnnnnnnnnnnnnnnnnnnnnnnnnnnnnnnnnnnnnnnnnnnnnnnnnnnnnnnnnnnnnnnnnnnnnnnnnnnnnnnnnnnnnnnnnnnnnnnnnnnnnnnnnnnnnnnnnnnnnnnnnnnnnnnnnnnnnnnnnnnnnnnnnnnnnnnnnnnnnnnnnnnnnnnnnnnnnnnnnnnnnnnnnnnnnnnnnnnnnnnnnnnnnnnnnnnnnnnnnnnnnnnnnnnnnnnnnnnnnnnnnnnnnnnnnnnnnnnnnnnnnnnnnnnnnnnnnnnnnnnnnnnnnnnnnnnnnnnnnnnnnnnnnnnnnnnnnnnnnnnnnnnnnnnnnnnnnnnnnnnnnnnnnnnnnnnnnnnnnnnnnnnnnnnnnnnnnnnnnnnnnnnnnnnnnnnnnnnnnnnnnnnnnnnnnnnnnnnnnnnnnnnnnnnnnnnnnnnnnnnnnnnnnnnnnnnnnnnnnnnnnnnnnnnnnnnnnnnnnnnnnnnnnnnnnnnnnnnnnnnnnnnnnnnnnnnnnnnnnnnnnnnnnnnnnnnnnnnnnnnnnnnnnnnnnnnnnnnnnnnnnnnnnnnnnnnnnnnnnnnnnnnnnnnnnnnnnnnnnnnnnnnnnnnnnnnnnnnnnnnnnnnnnnnnnnnnnnnnnnnnnnnnnnnnnnnnnnnnnnnnnnnnnnnnnnnnnnnnnnnnnnnnnnnnnnnnnnnnnnnnnnnnnnnnnnnnnnnnnnnnnnnnnnnnnnnnnnnnnnnnnnnnnnnnnnnnnnnnnnnnnnnnnnnnnnnnnnnnnnnnnnnnnnnnnnnnnnnnnnnnnnnnnnnnnnnnnnnnnnnnnnnnnnnnnnnnnnnnnnnnnnnnnnnnnnnnnnnnnnnnnnnnnnnnnnnnnnnnnnnnnnnnnnnnnnnnnnnnnnnnnnnnnnnnnnnnnnnnnnnnnnnnnnnnnnnnnnnnnnnnnnnnnnnnnnnnnnnnnnnnnnnnnnnnnnnnnnnnnnnnnnnnnnnnnnnnnnnnnnnnnnnnnnnnnnnnnnnnnnnnnnnnnnnnnnnnnnnnnnnnnnnnnnnnnnnnnnnnnnnnnnnnnnnnnnnnnnnnnnnnnnnnnnnnnnnnnnnnnnnnnnnnnnnnnnnnnnnnnnnnnnnnnnnnnnnnnnnnnnnnnnnnnnnnnnnnnnnnnnnnnnnnnnnnnnnnnnnnnnnnnnnnnnnnnnnnnnnnnnnnnnnnnnnnnnnnnnnnnnnnnnnnnnnnnnnnnnnnnnnnnnnnnnnnnnnnnnnnnnnnnnnnnnnnnnnnnnnnnnnnnnnnnnnnnnnnnnnnnnnnnnnnnnnnnnnnnnnnnnnnnnnnnnnnnnnnnnnnnnnnnnnnnnnnnnnnnnnnnnnnnnnnnnnnnnnnnnnnnnnnnnnnnnnnnnnnnnnnnnnnnnnnnnnnnnnnnnnnnnnnnnnnnnnnnnnnnnnnnnnnnnnnnnnnnnnnnnnnnnnnnnnnnnnnnnnnnnnnnnnnnnnnnnnnnnnnnnnnnnnnnnnnnnnnnnnnnnnnnnnnnnnnnnnnnnnnnnnnnnnnnnnnnnnnnnnnnnnnnnnnnnnnnnnnnnnnnnnnnnnnnnnnnnnnnnnnnnnnnnnnnnnnnnnnnnnnnnnnnnnnnnnnnnnnnnnnnnnnnnnnnnnnnnnnnnnnnnnnnnnnnnnnnnnnnnnnnnnnnnnnnnnnnnnnnnnnnnnnnnnnnnnnnnnnnnnnnnnnnnnnnnnnnnnnnnnnnnnnnnnnnnnnnnnnnnnnnnnnnnnnnnnnnnnnnnnnnnnnnnnnnnnnnnnnnnnnnnnnnnnnnnnnnnnnnnnnnnnnnnnnnnnnnnnnnnnnnnnnnnnnnnnnnnnnnnnnnnnnnnnnnnnnnnnnnnnnnnnnnnnnnnnnnnnnnnnnnnnnnnnnnnnnnnnnnnnnnnnnnnnnnnnnnnnnnnnnnnnnnnnnnnnnnnnnnnnnnnnnnnnnnnnnnnnnnnnnnnnnnnnnnnnnnnnnnnnnnnnnnnnnnnnnnnnnnnnnnnnnnnnnnnnnnnnnnnnnnnnnnnnnnnnnnnnnnnnnnnnnnnnnnnnnnnnnnnnnnnnnnnnnnnnnnnnnnnnnnnnnnnnnnnnnnnnnnnnnnnnnnnnnnnnnnnnnnnnnnnnnnnnnnnnnnnnnnnnnnnnnnnnnnnnnnnnnnnnnnnnnnnnnnnnnnnnnnnnnnnnnnnnnnnnnnnnnnnnnnnnnnnnnnnnnnnnnnnnnnnnnnnnnnnnnnnnnnnnnnnnnnnnnnnnnnnnnnnnnnnnnnnnnnnnnnnnnnnnnnnnnnnnnnnnnnnnnnnnnnnnnnnnnnnnnnnnnnnnnnnnnnnnnnnnnnnnnnnnnnnnnnnnnnnnnnnnnnnnnnnnnnnnnnnnnnnnnnnnnnnnnnnnnnnnnnnnnnnnnnnnnnnnnnnnnnnnnnnnnnnnnnnnnnnnnnnnnnnnnnnnnnnnnnnnnnnnnnnnnnnnnnnnnnnnnnnnnnnnnnnnnnnnnnnnnnnnnnnnnnnnnnnnnnnnnnnnnnnnnnnnnnnnnnnnnnnnnnnnnnnnnnnnnnnnnnnnnnnnnnnnnnnnnnnnnnnnnnnnnnnnnnnnnnnnnnnnnnnnnnnnnnnnnnnnnnnnnnnnnnnnnnnnnnnnnnnnnnnnnnnnnnnnnnnnnnnnnnnnnnnnnnnnnnnnnnnnnnnnnnnnnnnnnnnnnnnnnnnnnnnnnnnnnnnnnnnnnnnnnnnnnnnnnnnnnnnnnnnnnnnnnnnnnnnnnnnnnnnnnnnnnnnnnnnnnnnnnnnnnnnnnnnnnnnnnnnnnnnnnnnnnnnnnnnnnnnnnnnnnnnnnnnnnnnnnnnnnnnnnnnnnnnnnnnnnnnnnnnnnnnnnnnnnnnnnnnnnnnnnnnnnnnnnnnnnnnnnnnnnnnnnnnnnnnnnnnnnnnnnnnnnnnnnnnnnnnnnnnnnnnnnnnnnnnnnnnnnnnnnnnnnnnnnnnnnnnnnnnnnnnnnnnnnnnnnnnnnnnnnnnnnnnnnnnnnnnnnnnnnnnnnnnnnnnnnnnnnnnnnnnnnnnnnnnnnnnnnnnnnnnnnnnnnnnnnnnnnnnnnnnnnnnnnnnnnnnnnnnnnnnnnnnnnnnnnnnnnnnnnnnnnnnnnnnnnnnnnnnnnnnnnnnnnnnnnnnnnnnnnnnnnnnnnnnnnnnnnnnnnnnnnnnnnnnnnnnnnnnnnnnnnnnnnnnnnnnnnnnnnnnnnnnnnnnnnnnnnnnnnnnnnnnnnnnnnnnnnnnnnnnnnnnnnnnnnnnnnnnnnnnnnnnnnnnnnnnnnnnnnnnnnnnnnnnnnnnnnnnnnnnnnnnnnnnnnnnnnnnnnnnnnnnnnnnnnnnnnnnnnnnnnnnnnnnnnnnnnnnnnnnnnnnnnnnnnnnnnnnnnnnnnnnnnnnnnnnnnnnnnnnnnnnnnnnnnnnnnnnnnnnnnnnnnnnnnnnnnnnnnnnnnnnnnnnnnnnnnnnnnnnnnnnnnnnnnnnnnnnnnnnnnnnnnnnnnnnnnnnnnnnnnnnnnnnnnnnnnnnnnnnnnnnnnnnnnnnnnnnnnnnnnnnnnnnnnnnnnnnnnnnnnnnnnnnnnnnnnnnnnnnnnnnnnnnnnnnnnnnnnnnnnnnnnnnnnnnnnnnnnnnnnnnnnnnnnnnnnnnnnnnnnnnnnnnnnnnnnnnnnnnnnnnnnnnnnnnnnnnnnnnnnnnnnnnnnnnnnnnnnnnnnnnnnnnnnnnnnnnnnnnnnnnnnnnnnnnnnnnnnnnnnnnnnnnnnnnnnnnnnnnnnnnnnnnnnnnnnnnnnnnnnnnnnnnnnnnnnnnnnnnnnnnnnnnnnnnnnnnnnnnnnnnnnnnnnnnnnnnnnnnnnnnnnnnnnnnnnnnnnnnnnnnnnnnnnnnnnnnnnnnnnnnnnnnnnnnnnnnnnnnnnnnnnnnnnnnnnnnnnnnnnnnnnnnnnnnnnnnnnnnnnnnnnnnnnnnnnnnnnnnnnnnnnnnnnnnnnnnnnnnnnnnnnnnnnnnnnnnnnnnnnnnnnnnnnnnnnnnnnnnnnnnnnnnnnnnnnnnnnnnnnnnnnnnnnnnnnnnnnnnnnnnnnnnnnnnnnnnnnnnnnnnnnnnnnnnnnnnnnnnnnnnnnnnnnnnnnnnnnnnnnnnnnnnnnnnnnnnnnnnnnnnnnnnnnnnnnnnnnnnnnnnnnnnnnnnnnnnnnnnnnnnnnnnnnnnnnnnnnnnnnnnnnnnnnnnnnnnnnnnnnnnnnnnnnnnnnnnnnnnnnnnnnnnnnnnnnnnnnnnnnnnnnnnnnnnnnnnnnnnnnnnnnnnnnnnnnnnnnnnnnnnnnnnnnnnnnnnnnnnnnnnnnnnnnnnnnnnnnnnnnnnnnnnnnnnnnnnnnnnnnnnnnnnnnnnnnnnnnnnnnnnnnnnnnnnnnnnnnnnnnnnnnnnnnnnnnnnnnnnnnnnnnnnnnnnnnnnnnnnnnnnnnnnnnnnnnnnnnnnnnnnnnnnnnnnnnnnnnnnnnnnnnnnnnnnnnnnnnnnnnnnnnnnnnnnnnnnnnnnnnnnnnnnnnnnnnnnnnnnnnnnnnnnnnnnnnnnnnnnnnnnnnnnnnnnnnnnnnnnnnnnnnnnnnnnnnnnnnnnnnnnnnnnnnnnnnnnnnnnnnnnnnnnnnnnnnnnnnnnnnnnnnnnnnnnnnnnnnnnnnnnnnnnnnnnnnnnnnnnnnnnnnnnnnnnnnnnnnnnnnnnnnnnnnnnnnnnnnnnnnnnnnnnnnnnnnnnnnnnnnnnnnnnnnnnnnnnnnnnnnnnnnnnnnnnnnnnnnnnnnnnnnnnnnnnnnnnnnnnnnnnnnnnnnnnnnnnnnnnnnnnnnnnnnnnnnnnnnnnnnnnnnnnnnnnnnnnnnnnnnnnnnnnnnnnnnnnnnnnnnnnnnnnnnnnnnnnnnnnnnnnnnnnnnnnnnnnnnnnnnnnnnnnnnnnnnnnnnnnnnnnnnnnnnnnnnnnnnnnnnnnnnnnnnnnnnnnnnnnnnnnnnnnnnnnnnnnnnnnnnnnnnnnnnnnnnnnnnnnnnnnnnnnnnnnnnnnnnnnnnnnnnnnnnnnnnnnnnnnnnnnnnnnnnnnnnnnnnnnnnnnnnnnnnnnnnnnnnnnnnnnnnnnnnnnnnnnnnnnnnnnnnnnnnnnnnnnnnnnnnnnnnnnnnnnnnnnnnnnnnnnnnnnnnnnnnnnnnnnnnnnnnnnnnnnnnnnnnnnnnnnnnnnnnnnnnnnnnnnnnnnnnnnnnnnnnnnnnnnnnnnnnnnnnnnnnnnnnnnnnnnnnnnnnnnnnnnnnnnnnnnnnnnnnnnnnnnnnnnnnnnnnnnnnnnnnnnnnnnnnnnnnnnnnnnnnnnnnnnnnnnnnnnnnnnnnnnnnnnnnnnnnnnnnnnnnnnnnnnnnnnnnnnnnnnnnnnnnnnnnnnnnnnnnnnnnnnnnnnnnnnnnnnnnnnnnnnnnnnnnnnnnnnnnnnnnnnnnnnnnnnnnnnnnnnnnnnnnnnnnnnnnnnnnnnnnnnnnnnnnnnnnnnnnnnnnnnnnnnnnnnnnnnnnnnnnnnnnnnnnnnnnnnnnnnnnnnnnnnnnnnnnnnnnnnnnnnnnnnnnnnnnnnnnnnnnnnnnnnnnnnnnnnnnnnnnnnnnnnnnnnnnnnnnnnnnnnnnnnnnnnnnnnnnnnnnnnnnnnnnnnnnnnnnnnnnnnnnnnnnnnnnnnnnnnnnnnnnnnnnnnnnnnnnnnnnnnnnnnnnnnnnnnnnnnnnnnnnnnnnnnnnnnnnnnnnnnnnnnnnnnnnnnnnnnnnnnnnnnnnnnnnnnnnnnnnnnnnnnnnnnnnnnnnnnnnnnnnnnnnnnnnnnnnnnnnnnnnnnnnnnnnnnnnnnnnnnnnnnnnnnnnnnnnnnnnnnnnnnnnnnnnnnnnnnnnnnnnnnnnnnnnnnnnnnnnnnnnnnnnnnnnnnnnnnnnnnnnnnnnnnnnnnnnnnnnnnnnnnnnnnnnnnnnnnnnnnnnnnnnnnnnnnnnnnnnnnnnnnnnnnnnnnnnnnnnnnnnnnnnnnnnnnnnnnnnnnnnnnnnnnnnnnnnnnnnnnnnnnnnnnnnnnnnnnnnnnnnnnnnnnnnnnnnnnnnnnnnnnnnnnnnnnnnnnnnnnnnnnnnnnnnnnnnnnnnnnnnnnnnnnnnnnnnnnnnnnnnnnnnnnnnnnnnnnnnnnnnnnnnnnnnnnnnnnnnnnnnnnnnnnnnnnnnnnnnnnnnnnnnnnnnnnnnnnnnnnnnnnnnnnnnnnnnnnnnnnnnnnnnnnnnnnnnnnnnnnnnnnnnnnnnnnnnnnnnnnnnnnnnnnnnnnnnnnnnnnnnnnnnnnnnnnnnnnnnnnnnnnnnnnnnnnnnnnnnnnnnnnnnnnnnnnnnnnnnnnnnnnnnnnnnnnnnnnnnnnnnnnnnnnnnnnnnnnnnnnnnnnnnnnnnnnnnnnnnnnnnnnnnnnnnnnnnnnnnnnnnnnnnnnnnnnnnnnnnnnnnnnnnnnnnnnnnnnnnnnnnnnnnnnnnnnnnnnnnnnnnnnnnnnnnnnnnnnnnnnnnnnnnnnnnnnnnnnnnnnnnnnnnnnnnnnnnnnnnnnnnnnnnnnnnnnnnnnnnnnnnnnnnnnnnnnnnnnnnnnnnnnnnnnnnnnnnnnnnnnnnnnnnnnnnnnnnnnnnnnnnnnnnnnnnnnnnnnnnnnnnnnnnnnnnnnnnnnnnnnnnnnnnnnnnnnnnnnnnnnnnnnnnnnnnnnnnnnnnnnnnnnnnnnnnnnnnnnnnnnnnnnnnnnnnnnnnnnnnnnnnnnnnnnnnnnnnnnnnnnnnnnnnnnnnnnnnnnnnnnnnnnnnnnnnnnnnnnnnnnnnnnnnnnnnnnnnnnnnnnnnnnnnnnnnnnnnnnnnnnnnnnnnnnnnnnnnnnnnnnnnnnnnnnnnnnnnnnnnnnnnnnnnnnnnnnnnnnnnnnnnnnnnnnnnnnnnnnnnnnnnnnnnnnnnnnnnnnnnnnnnnnnnnnnnnnnnnnnnnnnnnnnnnnnnnnnnnnnnnnnnnnnnnnnnnnnnnnnnnnnnnnnnnnnnnnnnnnnnnnnnnnnnnnnnnnnnnnnnnnnnnnnnnnnnnnnnnnnnnnnnnnnnnnnnnnnnnnnnnnnnnnnnnnnnnnnnnnnnnnnnnnnnnnnnnnnnnnnnnnnnnnnnnnnnnnnnnnnnnnnnnnnnnnnnnnnnnnnnnnnnnnnnnnnnnnnnnnnnnnnnnnnnnnnnnnnnnnnnnnnnnnnnnnnnnnnnnnnnnnnnnnnnnnnnnnnnnnnnnnnnnnnnnnnnnnnnnnnnnnnnnnnnnnnnnnnnnnnnnnnnnnnnnnnnnnnnnnnnnnnnnnnnnnnnnnnnnnnnnnnnnnnnnnnnnnnnnnnnnnnnnnnnnnnnnnnnnnnnnnnnnnnnnnnnnnnnnnnnnnnnnnnnnnnnnnnnnnnnnnnnnnnnnnnnnnnnnnnnnnnnnnnnnnnnnnnnnnnnnnnnnnnnnnnnnnnnnnnnnnnnnnnnnnnnnnnnnnnnnnnnnnnnnnnnnnnnnnnnnnnnnnnnnnnnnnnnnnnnnnnnnnnnnnnnnnnnnnnnnnnnnnnnnnnnnnnnnnnnnnnnnnnnnnnnnnnnnnnnnnnnnnnnnnnnnnnnnnnnnnnnnnnnnnnnnnnnnnnnnnnnnnnnnnnnnnnnnnnnnnnnnnnnnnnnnnnnnnnnnnnnnnnnnnnnnnnnnnnnnnnnnnnnnnnnnnnnnnnnnnnnnnnnnnnnnnnnnnnnnnnnnnnnnnnnnnnnnnnnnnnnnnnnnnnnnnnnnnnnnnnnnnnnnnnnnnnnnnnnnnnnnnnnnnnnnnnnnnnnnnnnnnnnnnnnnnnnnnnnnnnnnnnnnnnnnnnnnnnnnnnnnnnnnnnnnnnnnnnnnnnnnnnnnnnnnnnnnnnnnnnnnnnnnnnnnnnnnnnnnnnnnnnnnnnnnnnnnnnnnnnnnnnnnnnnnnnnnnnnnnnnnnnnnnnnnnnnnnnnnnnnnnnnnnnnnnnnnnnnnnnnnnnnnnnnnnnnnnnnnnnnnnnnnnnnnnnnnnnnnnnnnnnnnnnnnnnnnnnnnnnnnnnnnnnnnnnnnnnnnnnnnnnnnnnnnnnnnnnnnnnnnnnnnnnnnnnnnnnnnnnnnnnnnnnnnnnnnnnnnnnnnnnnnnnnnnnnnnnnnnnnnnnnnnnnnnnnnnnnnnnnnnnnnnnnnnnnnnnnnnnnnnnnnnnnnnnnnnnnnnnnnnnnnnnnnnnnnnnnnnnnnnnnnnnnnnnnnnnnnnnnnnnnnnnnnnnnnnnnnnnnnnnnnnnnnnnnnnnnnnnnnnnnnnnnnnnnnnnnnnnnnnnnnnnnnnnnnnnnnnnnnnnnnnnnnnnnnnnnnnnnnnnnnnnnnnnnnnnnnnnnnnnnnnnnnnnnnnnnnnnnnnnnnnnnnnnnnnnnnnnnnnnnnnnnnnnnnnnnnnnnnnnnnnnnnnnnnnnnnnnnnnnnnnnnnnnnnnnnnnnnnnnnnnnnnnnnnnnnnnnnnnnnnnnnnnnnnnnnnnnnnnnnnnnnnnnnnnnnnnnnnnnnnnnnnnnnnnnnnnnnnnnnnnnnnnnnnnnnnnnnnnnnnnnnnnnnnnnnnnnnnnnnnnnnnnnnnnnnnnnnnnnnnnnnnnnnnnnnnnnnnnnnnnnnnnnnnnnnnnnnnnnnnnnnnnnnnnnnnnnnnnnnnnnnnnnnnnnnnnnnnnnnnnnnnnnnnnnnnnnnnnnnnnnnnnnnnnnnnnnnnnnnnnnnnnnnnnnnnnnnnnnnnnnnnnnnnnnnnnnnnnnnnnnnnnnnnnnnnnnnnnnnnnnnnnnnnnnnnnnnnnnnnnnnnnnnnnnnnnnnnnnnnnnnnnnnnnnnnnnnnnnnnnnnnnnnnnnnnnnnnnnnnnnnnnnnnnnnnnnnnnnnnnnnnnnnnnnnnnnnnnnnnnnnnnnnnnnnnnnnnnnnnnnnnnnnnnnnnnnnnnnnnnnnnnnnnnnnnnnnnnnnnnnnnnnnnnnnnnnnnnnnnnnnnnnnnnnnnnnnnnnnnnnnnnnnnnnnnnnnnnnnnnnnnnnnnnnnnnnnnnnnnnnnnnnnnnnnnnnnnnnnnnnnnnnnnnnnnnnnnnnnnnnnnnnnnnnnnnnnnnnnnnnnnnnnnnnnnnnnnnnnnnnnnnnnnnnnnnnnnnnnnnnnnnnnnnnnnnnnnnnnnnnnnnnnnnnnnnnnnnnnnnnnnnnnnnnnnnnnnnnnnnnnnnnnnnnnnnnnnnnnnnnnnnnnnnnnnnnnnnnnnnnnnnnnnnnnnnnnnnnnnnnnnnnnnnnnnnnnnnnnnnnnnnnnnnnnnnnnnnnnnnnnnnnnnnnnnnnnnnnnnnnnnnnnnnnnnnnnnnnnnnnnnnnnnnnnnnnnnnnnnnnnnnnnnnnnnnnnnnnnnnnnnnnnnnnnnnnnnnnnnnnnnnnnnnnnnnnnnnnnnnnnnnnnnnnnnnnnnnnnnnnnnnnnnnnnnnnnnnnnnnnnnnnnnnnnnnnnnnnnnnnnnnnnnnnnnnnnnnnnnnnnnnnnnnnnnnnnnnnnnnnnnnnnnnnnnnnnnnnnnnnnnnnnnnnnnnnnnnnnnnnnnnnnnnnnnnnnnnnnnnnnnnnnnnnnnnnnnnnnnnnnnnnnnnnnnnnnnnnnnnnnnnnnnnnnnnnnnnnnnnnnnnnnnnnnnnnnnnnnnnnnnnnnnnnnnnnnnnnnnnnnnnnnnnnnnnnnnnnnnnnnnnnnnnnnnnnnnnnnnnnnnnnnnnnnnnnnnnnnnnnnnnnnnnnnnnnnnnnnnnnnnnnnnnnnnnnnnnnnnnnnnnnnnnnnnnnnnnnnnnnnnnnnnnnnnnnnnnnnnnnnnnnnnnnnnnnnnnnnnnnnnnnnnnnnnnnnnnnnnnnnnnnnnnnnnnnnnnnnnnnnnnnnnnnnnnnnnnnnnnnnnnnnnnnnnnnnnnnnnnnnnnnnnnnnnnnnnnnnnnnnnnnnnnnnnnnnnnnnnnnnnnnnnnnnnnnnnnnnnnnnnnnnnnnnnnnnnnnnnnnnnnnnnnnnnnnnnnnnnnnnnnnnnnnnnnnnnnnnnnnnnnnnnnnnnnnnnnnnnnnnnnnnnnnnnnnnnnnnnnnnnnnnnnnnnnnnnnnnnnnnnnnnnnnnnnnnnnnnnnnnnnnnnnnnnnnnnnnnnnnnnnnnnnnnnnnnnnnnnnnnnnnnnnnnnnnnnnnnnnnnnnnnnnnnnnnnnnnnnnnnnnnnnnnnnnnnnnnnnnnnnnnnnnnnnnnnnnnnnnnnnnnnnnnnnnnnnnnnnnnnnnnnnnnnnnnnnnnnnnnnnnnnnnnnnnnnnnnnnnnnnnnnnnnnnnnnnnnnnnnnnnnnnnnnnnnnnnnnnnnnnnnnnnnnnnnnnnnnnnnnnnnnnnnnnnnnnnnnnnnnnnnnnnnnnnnnnnnnnnnnnnnnnnnnnnnnnnnnnnnnnnnnnnnnnnnnnnnnnnnnnnnnnnnnnnnnnnnnnnnnnnnnnnnnnnnnnnnnnnnnnnnnnnnnnnnnnnnnnnnnnnnnnnnnnnnnnnnnnnnnnnnnnnnnnnnnnnnnnnnnnnnnnnnnnnnnnnnnnnnnnnnnnnnnnnnnnnnnnnnnnnnnnnnnnnnnnnnnnnnnnnnnnnnnnnnnnnnnnnnnnnnnnnnnnnnnnnnnnnnnnnnnnnnnnnnnnnnnnnnnnnnnnnnnnnnnnnnnnnnnnnnnnnnnnnnnnnnnnnnnnnnnnnnnnnnnnnnnnnnnnnnnnnnnnnnnnnnnnnnnnnnnnnnnnnnnnnnnnnnnnnnnnnnnnnnnnnnnnnnnnnnnnnnnnnnnnnnnnnnnnnnnnnnnnnnnnnnnnnnnnnnnnnnnnnnnnnnnnnnnnnnnnnnnnnnnnnnnnnnnnnnnnnnnnnnnnnnnnnnnnnnnnnnnnnnnnnnnnnnnnnnnnnnnnnnnnnnnnnnnnnnnnnnnnnnnnnnnnnnnnnnnnnnnnnnnnnnnnnnnnnnnnnnnnnnnnnnnnnnnnnnnnnnnnnnnnnnnnnnnnnnnnnnnnnnnnnnnnnnnnnnnnnnnnnnnnnnnnnnnnnnnnnnnnnnnnnnnnnnnnnnnnnnnnnnnnnnnnnnnnnnnnnnnnnnnnnnnnnnnnnnnnnnnnnnnnnnnnnnnnnnnnnnnnnnnnnnnnnnnnnnnnnnnnnnnnnnnnnnnnnnnnnnnnnnnnnnnnnnnnnnnnnnnnnnnnnnnnnnnnnnnnnnnnnnnnnnnnnnnnnnnnnnnnnnnnnnnnnnnnnnnnnnnnnnnnnnnnnnnnnnnnnnnnnnnnnnnnnnnnnnnnnnnnnnnnnnnnnnnnnnnnnnnnnnnnnnnnnnnnnnnnnnnnnnnnnnnnnnnnnnnnnnnnnnnnnnnnnnnnnnnnnnnnnnnnnnnnnnnnnnnnnnnnnnnnnnnnnnnnnnnnnnnnnnnnnnnnnnnnnnnnnnnnnnnnnnnnnnnnnnnnnnnnnnnnnnnnnnnnnnnnnnnnnnnnnnnnnnnnnnnnnnnnnnnnnnnnnnnnnnnnnnnnnnnnnnnnnnnnnnnnnnnnnnnnnnnnnnnnnnnnnnnnnnnnnnnnnnnnnnnnnnnnnnnnnnnnnnnnnnnnnnnnnnnnnnnnnnnnnnnnnnnnnnnnnnnnnnnnnnnnnnnnnnnnnnnnnnnnnnnnnnnnnnnnnnnnnnnnnnnnnnnnnnnnnnnnnnnnnnnnnnnnnnnnnnnnnnnnnnnnnnnnnnnnnnnnnnnnnnnnnnnnnnnnnnnnnnnnnnnnnnnnnnnnnnnnnnnnnnnnnnnnnnnnnnnnnnnnnnnnnnnnnnnnnnnnnnnnnnnnnnnnnnnnnnnnnnnnnnnnnnnnnnnnnnnnnnnnnnnnnnnnnnnnnnnnnnnnnnnnnnnnnnnnnnnnnnnnnnnnnnnnnnnnnnnnnnnnnnnnnnnnnnnnnnnnnnnnnnnnnnnnnnnnnnnnnnnnnnnnnnnnnnnnnnnnnnnnnnnnnnnnnnnnnnnnnnnnnnnnnnnnnnnnnnnnnnnnnnnnnnnnnnnnnnnnnnnnnnnnnnnnnnnnnnnnnnnnnnnnnnnnnnnnnnnnnnnnnnnnnnnnnnnnnnnnnnnnnnnnnnnnnnnnnnnnnnnnnnnnnnnnnnnnnnnnnnnnnnnnnnnnnnnnnnnnnnnnnnnnnnnnnnnnnnnnnnnnnnnnnnnnnnnnnnnnnnnnnnnnnnnnnnnnnnnnnnnnnnnnnnnnnnnnnnnnnnnnnnnnnnnnnnnnnnnnnnnnnnnnnnnnnnnnnnnnnnnnnnnnnnnnnnnnnnnnnnnnnnnnnnnnnnnnnnnnnnnnnnnnnnnnnnnnnnnnnnnnnnnnnnnnnnnnnnnnnnnnnnnnnnnnnnnnnnnnnnnnnnnnnnnnnnnnnnnnnnnnnnnnnnnnnnnnnnnnnnnnnnnnnnnnnnnnnnnnnnnnnnnnnnnnnnnnnnnnnnnnnnnnnnnnnnnnnnnnnnnnnnnnnnnnnnnnnnnnnnnnnnnnnnnnnnnnnnnnnnnnnnnnnnnnnnnnnnnnnnnnnnnnnnnnnnnnnnnnnnnnnnnnnnnnnnnnnnnnnnnnnnnnnnnnnnnnnnnnnnnnnnnnnnnnnnnnnnnnnnnnnnnnnnnnnnnnnnnnnnnnnnnnnnnnnnnnnnnnnnnnnnnnnnnnnnnnnnnnnnnnnnnnnnnnnnnnnnnnnnnnnnnnnnnnnnnnnnnnnnnnnnnnnnnnnnnnnnnnnnnnnnnnnnnnnnnnnnnnnnnnnnnnnnnnnnnnnnnnnnnnnnnnnnnnnnnnnnnnnnnnnnnnnnnnnnnnnnnnnnnnnnnnnnnnnnnnnnnnnnnnnnnnnnnnnnnnnnnnnnnnnnnnnnnnnnnnnnnnnnnnnnnnnnnnnnnnnnnnnnnnnnnnnnnnnnnnnnnnnnnnnnnnnnnnnnnnnnnnnnnnnnnnnnnnnnnnnnnnnnnnnnnnnnnnnnnnnnnnnnnnnnnnnnnnnnnnnnnnnnnnnnnnnnnnnnnnnnnnnnnnnnnnnnnnnnnnnnnnnnnnnnnnnnnnnnnnnnnnnnnnnnnnnnnnnnnnnnnnnnnnnnnnnnnnnnnnnnnnnnnnnnnnnnnnnnnnnnnnnnnnnnnnnnnnnnnnnnnnnnnnnnnnnnnnnnnnnnnnnnnnnnnnnnnnnnnnnnnnnnnnnnnnnnnnnnnnnnnnnnnnnnnnnnnnnnnnnnnnnnnnnnnnnnnnnnnnnnnnnnnnnnnnnnnnnnnnnnnnnnnnnnnnnnnnnnnnnnnnnnnnnnnnnnnnnnnnnnnnnnnnnnnnnnnnnnnnnnnnnnnnnnnnnnnnnnnnnnnnnnnnnnnnnnnnnnnnnnnnnnnnnnnnnnnnnnnnnnnnnnnnnnnnnnnnnnnnnnnnnnnnnnnnnnnnnnnnnnnnnnnnnnnnnnnnnnnnnnnnnnnnnnnnnnnnnnnnnnnnnnnnnnnnnnnnnnnnnnnnnnnnnnnnnnnnnnnnnnnnnnnnnnnnnnnnnnnnnnnnnnnnnnnnnnnnnnnnnnnnnnnnnnnnnnnnnnnnnnnnnnnnnnnnnnnnnnnnnnnnnnnnnnnnnnnnnnnnnnnnnnnnnnnnnnnnnnnnnnnnnnnnnnnnnnnnnnnnnnnnnnnnnnnnnnnnnnnnnnnnnnnnnnnnnnnnnnnnnnnnnnnnnnnnnnnnnnnnnnnnnnnnnnnnnnnnnnnnnnnnnnnnnnnnnnnnnnnnnnnnnnnnnnnnnnnnnnnnnnnnnnnnnnnnnnnnnnnnnnnnnnnnnnnnnnnnnnnnnnnnnnnnnnnnnnnnnnnnnnnnnnnnnnnnnnnnnnnnnnnnnnnnnnnnnnnnnnnnnnnnnnnnnnnnnnnnnnnnnnnnnnnnnnnnnnnnnnnnnnnnnnnnnnnnnnnnnnnnnnnnnnnnnnnnnnnnnnnnnnnnnnnnnnnnnnnnnnnnnnnnnnnnnnnnnnnnnnnnnnnnnnnnnnnnnnnnnnnnnnnnnnnnnnnnnnnnnnnnnnnnnnnnnnnnnnnnnnnnnnnnnnnnnnnnnnnnnnnnnnnnnnnnnnnnnnnnnnnnnnnnnnnnnnnnnnnnnnnnnnnnnnnnnnnnnnnnnnnnnnnnnnnnnnnnnnnnnnnnnnnnnnnnnnnnnnnnnnnnnnnnnnnnnnnnnnnnnnnnnnnnnnnnnnnnnnnnnnnnnnnnnnnnnnnnnnnnnnnnnnnnnnnnnnnnnnnnnnnnnnnnnnnnnnnnnnnnnnnnnnnnnnnnnnnnnnnnnnnnnnnnnnnnnnnnnnnnnnnnnnnnnnnnnnnnnnnnnnnnnnnnnnnnnnnnnnnnnnnnnnnnnnnnnnnnnnnnnnnnnnnnnnnnnnnnnnnnnnnnnnnnnnnnnnnnnnnnnnnnnnnnnnnnnnnnnnnnnnnnnnnnnnnnnnnnnnnnnnnnnnnnnnnnnnnnnnnnnnnnnnnnnnnnnnnnnnnnnnnnnnnnnnnnnnnnnnnnnnnnnnnnnnnnnnnnnnnnnnnnnnnnnnnnnnnnnnnnnnnnnnnnnnnnnnnnnnnnnnnnnnnnnnnnnnnnnnnnnnnnnnnnnnnnnnnnnnnnnnnnnnnnnnnnnnnnnnnnnnnnnnnnnnnnnnnnnnnnnnnnnnnnnnnnnnnnnnnnnnnnnnnnnnnnnnnnnnnnnnnnnnnnnnnnnnnnnnnnnnnnnnnnnnnnnnnnnnnnnnnnnnnnnnnnnnnnnnnnnnnnnnnnnnnnnnnnnnnnnnnnnnnnnnnnnnnnnnnnnnnnnnnnnnnnnnnnnnnnnnnnnnnnnnnnnnnnnnnnnnnnnnnnnnnnnnnnnnnnnnnnnnnnnnnnnnnnnnnnnnnnnnnnnnnnnnnnnnnnnnnnnnnnnnnnnnnnnnnnnnnnnnnnnnnnnnnnnnnnnnnnnnnnnnnnnnnnnnnnnnnnnnnnnnnnnnnnnnnnnnnnnnnnnnnnnnnnnnnnnnnnnnnnnnnnnnnnnnnnnnnnnnnnnnnnnnnnnnnnnnnnnnnnnnnnnnnnnnnnnnnnnnnnnnnnnnnnnnnnnnnnnnnnnnnnnnnnnnnnnnnnnnnnnnnnnnnnnnnnnnnnnnnnnnnnnnnnnnnnnnnnnnnnnnnnnnnnnnnnnnnnnnnnnnnnnnnnnnnnnnnnnnnnnnnnnnnnnnnnnnnnnnnnnnnnnnnnnnnnnnnnnnnnnnnnnnnnnnnnnnnnnnnnnnnnnnnnnnnnnnnnnnnnnnnnnnnnnnnnnnnnnnnnnnnnnnnnnnnnnnnnnnnnnnnnnnnnnnnnnnnnnnnnnnnnnnnnnnnnnnnnnnnnnnnnnnnnnnnnnnnnnnnnnnnnnnnnnnnnnnnnnnnnnnnnnnnnnnnnnnnnnnnnnnnnnnnnnnnnnnnnnnnnnnnnnnnnnnnnnnnnnnnnnnnnnnnnnnnnnnnnnnnnnnnnnnnnnnnnnnnnnnnnnnnnnnnnnnnnnnnnnnnnnnnnnnnnnnnnnnnnnnnnnnnnnnnnnnnnnnnnnnnnnnnnnnnnnnnnnnnnnnnnnnnnnnnnnnnnnnnnnnnnnnnnnnnnnnnnnnnnnnnnnnnnnnnnnnnnnnnnnnnnnnnnnnnnnnnnnnnnnnnnnnnnnnnnnnnnnnnnnnnnnnnnnnnnnnnnnnnnnnnnnnnnnnnnnnnnnnnnnnnnnnnnnnnnnnnnnnnnnnnnnnnnnnnnnnnnnnnnnnnnnnnnnnnnnnnnnnnnnnnnnnnnnnnnnnnnnnnnnnnnnnnnnnnnnnnnnnnnnnnnnnnnnnnnnnnnnnnnnnnnnnnnnnnnnnnnnnnnnnnnnnnnnnnnnnnnnnnnnnnnnnnnnnnnnnnnnnnnnnnnnnnnnnnnnnnnnnnnnnnnnnnnnnnnnnnnnnnnnnnnnnnnnnnnnnnnnnnnnnnnnnnnnnnnnnnnnnnnnnnnnnnnnnnnnnnnnnnnnnnnnnnnnnnnnnnnnnnnnnnnnnnnnnnnnnnnnnnnnnnnnnnnnnnnnnnnnnnnnnnnnnnnnnnnnnnnnnnnnnnnnnnnnnnnnnnnnnnnnnnnnnnnnnnnnnnnnnnnnnnnnnnnnnnnnnnnnnnnnnnnnnnnnnnnnnnnnnnnnnnnnnnnnnnnnnnnnnnnnnnnnnnnnnnnnnnnnnnnnnnnnnnnnnnnnnnnnnnnnnnnnnnnnnnnnnnnnnnnnnnnnnnnnnnnnnnnnnnnnnnnnnnnnnnnnnnnnnnnnnnnnnnnnnnnnnnnnnnnnnnnnnnnnnnnnnnnnnnnnnnnnnnnnnnnnnnnnnnnnnnnnnnnnnnnnnnnnnnnnnnnnnnnnnnnnnnnnnnnnnnnnnnnnnnnnnnnnnnnnnnnnnnnnnnnnnnnnnnnnnnnnnnnnnnnnnnnnnnnnnnnnnnnnnnnnnnnnnnnnnnnnnnnnnnnnnnnnnnnnnnnnnnnnnnnnnnnnnnnnnnnnnnnnnnnnnnnnnnnnnnnnnnnnnnnnnnnnnnnnnnnnnnnnnnnnnnnnnnnnnnnnnnnnnnnnnnnnnnnnnnnnnnnnnnnnnnnnnnnnnnnnnnnnnnnnnnnnnnnnnnnnnnnnnnnnnnnnnnnnnnnnnnnnnnnnnnnnnnnnnnnnnnnnnnnnnnnnnnnnnnnnnnnnnnnnnnnnnnnnnnnnnnnnnnnnnnnnnnnnnnnnnnnnnnnnnnnnnnnnnnnnnnnnnnnnnnnnnnnnnnnnnnnnnnnnnnnnnnnnnnnnnnnnnnnnnnnnnnnnnnnnnnnnnnnnnnnnnnnnnnnnnnnnnnnnnnnnnnnnnnnnnnnnnnnnnnnnnnnnnnnnnnnnnnnnnnnnnnnnnnnnnnnnnnnnnnnnnnnnnnnnnnnnnnnnnnnnnnnnnnnnnnnnnnnnnnnnnnnnnnnnnnnnnnnnnnnnnnnnnnnnnnnnnnnnnnnnnnnnnnnnnnnnnnnnnnnnnnnnnnnnnnnnnnnnnnnnnnnnnnnnnnnnnnnnnnnnnnnnnnnnnnnnnnnnnnnnnnnnnnnnnnnnnnnnnnnnnnnnnnnnnnnnnnnnnnnnnnnnnnnnnnnnnnnnnnnnnnnnnnnnnnnnnnnnnnnnnnnnnnnnnnnnnnnnnnnnnnnnnnnnnnnnnnnnnnnnnnnnnnnnnnnnnnnnnnnnnnnnnnnnnnnnnnnnnnnnnnnnnnnnnnnnnnnnnnnnnnnnnnnnnnnnnnnnnnnnnnnnnnnnnnnnnnnnnnnnnnnnnnnnnnnnnnnnnnnnnnnnnnnnnnnnnnnnnnnnnnnnnnnnnnnnnnnnnnnnnnnnnnnnnnnnnnnnnnnnnnnnnnnnnnnnnnnnnnnnnnnnnnnnnnnnnnnnnnnnnnnnnnnnnnnnnnnnnnnnnnnnnnnnnnnnnnnnnnnnnnnnnnnnnnnnnnnnnnnnnnnnnnnnnnnnnnnnnnnnnnnnnnnnnnnnnnnnnnnnnnnnnnnnnnnnnnnnnnnnnnnnnnnnnnnnnnnnnnnnnnnnnnnnnnnnnnnnnnnnnnnnnnnnnnnnnnnnnnnnnnnnnnnnnnnnnnnnnnnnnnnnnnnnnnnnnnnnnnnnnnnnnnnnnnnnnnnnnnnnnnnnnnnnnnnnnnnnnnnnnnnnnnnnnnnnnnnnnnnnnnnnnnnnnnnnnnnnnnnnnnnnnnnnnnnnnnnnnnnnnnnnnnnnnnnnnnnnnnnnnnnnnnnnnnnnnnnnnnnnnnnnnnnnnnnnnnnnnnnnnnnnnnnnnnnnnnnnnnnnnnnnnnnnnnnnnnnnnnnnnnnnnnnnnnnnnnnnnnnnnnnnnnnnnnnnnnnnnnnnnnnnnnnnnnnnnnnnnnnnnnnnnnnnnnnnnnnnnnnnnnnnnnnnnnnnnnnnnnnnnnnnnnnnnnnnnnnnnnnnnnnnnnnnnnnnnnnnnnnnnnnnnnnnnnnnnnnnnnnnnnnnnnnnnnnnnnnnnnnnnnnnnnnnnnnnnnnnnnnnnnnnnnnnnnnnnnnnnnnnnnnnnnnnnnnnnnnnnnnnnnnnnnnnnnnnnnnnnnnnnnnnnnnnnnnnnnnnnnnnnnnnnnnnnnnnnnnnnnnnnnnnnnnnnnnnnnnnnnnnnnnnnnnnnnnnnnnnnnnnnnnnnnnnnnnnnnnnnnnnnnnnnnnnnnnnnnnnnnnnnnnnnnnnnnnnnnnnnnnnnnnnnnnnnnnnnnnnnnnnnnnnnnnnnnnnnnnnnnnnnnnnnnnnnnnnnnnnnnnnnnnnnnnnnnnnnnnnnnnnnnnnnnnnnnnnnnnnnnnnnnnnnnnnnnnnnnnnnnnnnnnnnnnnnnnnnnnnnnnnnnnnnnnnnnnnnnnnnnnnnnnnnnnnnnnnnnnnnnnnnnnnnnnnnnnnnnnnnnnnnnnnnnnnnnnnnnnnnnnnnnnnnnnnnnnnnnnnnnnnnnnnnnnnnnnnnnnnnnnnnnnnnnnnnnnnnnnnnnnnnnnnnnnnnnnnnnnnnnnnnnnnnnnnnnnnnnnnnnnnnnnnnnnnnnnnnnnnnnnnnnnnnnnnnnnnnnnnnnnnnnnnnnnnnnnnnnnnnnnnnnnnnnnnnnnnnnnnnnnnnnnnnnnnnnnnnnnnnnnnnnnnnnnnnnnnnnnnnnnnnnnnnnnnnnnnnnnnnnnnnnnnnnnnnnnnnnnnnnnnnnnnnnnnnnnnnnnnnnnnnnnnnnnnnnnnnnnnnnnnnnnnnnnnnnnnnnnnnnnnnnnnnnnnnnnnnnnnnnnnnnnnnnnnnnnnnnnnnnnnnnnnnnnnnnnnnnnnnnnnnnnnnnnnnnnnnnnnnnnnnnnnnnnnnnnnnnnnnnnnnnnnnnnnnnnnnnnnnnnnnnnnnnnnnnnnnnnnnnnnnnnnnnnnnnnnnnnnnnnnnnnnnnnnnnnnnnnnnnnnnnnnnnnnnnnnnnnnnnnnnnnnnnnnnnnnnnnnnnnnnnnnnnnnnnnnnnnnnnnnnnnnnnnnnnnnnnnnnnnnnnnnnnnnnnnnnnnnnnnnnnnnnnnnnnnnnnnnnnnnnnnnnnnnnnnnnnnnnnnnnnnnnnnnnnnnnnnnnnnnnnnnnnnnnnnnnnnnnnnnnnnnnnnnnnnnnnnnnnnnnnnnnnnnnnnnnnnnnnnnnnnnnnnnnnnnnnnnnnnnnnnnnnnnnnnnnnnnnnnnnnnnnnnnnnnnnnnnnnnnnnnnnnnnnnnnnnnnnnnnnnnnnnnnnnnnnnnnnnnnnnnnnnnnnnnnnnnnnnnnnnnnnnnnnnnnnnnnnnnnnnnnnnnnnnnnnnnnnnnnnnnnnnnnnnnnnnnnnnnnnnnnnnnnnnnnnnnnnnnnnnnnnnnnnnnnnnnnnnnnnnnnnnnnnnnnnnnnnnnnnnnnnnnnnnnnnnnnnnnnnnnnnnnnnnnnnnnnnnnnnnnnnnnnnnnnnnnnnnnnnnnnnnnnnnnnnnnnnnnnnnnnnnnnnnnnnnnnnnnnnnnnnnnnnnnnnnnnnnnnnnnnnnnnnnnnnnnnnnnnnnnnnnnnnnnnnnnnnnnnnnnnnnnnnnnnnnnnnnnnnnnnnnnnnnnnnnnnnnnnnnnnnnnnnnnnnnnnnnnnnnnnnnnnnnnnnnnnnnnnnnnnnnnnnnnnnnnnnnnnnnnnnnnnnnnnnnnnnnnnnnnnnnnnnnnnnnnnnnnnnnnnnnnnnnnnnnnnnnnnnnnnnnnnnnnnnnnnnnnnnnnnnnnnnnnnnnnnnnnnnnnnnnnnnnnnnnnnnnnnnnnnnnnnnnnnnnnnnnnnnnnnnnnnnnnnnnnnnnnnnnnnnnnnnnnnnnnnnnnnnnnnnnnnnnnnnnnnnnnnnnnnnnnnnnnnnnnnnnnnnnnnnnnnnnnnnnnnnnnnnnnnnnnnnnnnnnnnnnnnnnnnnnnnnnnnnnnnnnnnnnnnnnnnnnnnnnnnnnnnnnnnnnnnnnnnnnnnnnnnnnnnnnnnnnnnnnnnnnnnnnnnnnnnnnnnnnnnnnnnnnnnnnnnnnnnnnnnnnnnnnnnnnnnnnnnnnnnnnnnnnnnnnnnnnnnnnnnnnnnnnnnnnnnnnnnnnnnnnnnnnnnnnnnnnnnnnnnnnnnnnnnnnnnnnnnnnnnnnnnnnnnnnnnnnnnnnnnnnnnnnnnnnnnnnnnnnnnnnnnnnnnnnnnnnnnnnnnnnnnnnnnnnnnnnnnnnnnnnnnnnnnnnnnnnnnnnnnnnnnnnnnnnnnnnnnnnnnnnnnnnnnnnnnnnnnnnnnnnnnnnnnnnnnnnnnnnnnnnnnnnnnnnnnnnnnnnnnnnnnnnnnnnnnnnnnnnnnnnnnnnnnnnnnnnnnnnnnnnnnnnnnnnnnnnnnnnnnnnnnnnnnnnnnnnnnnnnnnnnnnnnnnnnnnnnnnnnnnnnnnnnnnnnnnnnnnnnnnnnnnnnnnnnnnnnnnnnnnnnnnnnnnnnnnnnnnnnnnnnnnnnnnnnnnnnnnnnnnnnnnnnnnnnnnnnnnnnnnnnnnnnnnnnnnnnnnnnnnnnnnnnnnnnnnnnnnnnnnnnnnnnnnnnnnnnnnnnnnnnnnnnnnnnnnnnnnnnnnnnnnnnnnnnnnnnnnnnnnnnnnnnnnnnnnnnnnnnnnnnnnnnnnnnnnnnnnnnnnnnnnnnnnnnnnnnnnnnnnnnnnnnnnnnnnnnnnnnnnnnnnnnnnnnnnnnnnnnnnnnnnnnnnnnnnnnnnnnnnnnnnnnnnnnnnnnnnnnnnnnnnnnnnnnnnnnnnnnnnnnnnnnnnnnnnnnnnnnnnnnnnnnnnnnnnnnnnnnnnnnnnnnnnnnnnnnnnnnnnnnnnnnnnnnnnnnnnnnnnnnnnnnnnnnnnnnnnnnnnnnnnnnnnnnnnnnnnnnnnnnnnnnnnnnnnnnnnnnnnnnnnnnnnnnnnnnnnnnnnnnnnnnnnnnnnnnnnnnnnnnnnnnnnnnnnnnnnnnnnnnnnnnnnnnnnnnnnnnnnnnnnnnnnnnnnnnnnnnnnnnnnnnnnnnnnnnnnnnnnnnnnnnnnnnnnnnnnnnnnnnnnnnnnnnnnnnnnnnnnnnnnnnnnnnnnnnnnnnnnnnnnnnnnnnnnnnnnnnnnnnnnnnnnnnnnnnnnnnnnnnnnnnnnnnnnnnnnnnnnnnnnnnnnnnnnnnnnnnnnnnnnnnnnnnnnnnnnnnnnnnnnnnnnnnnnnnnnnnnnnnnnnnnnnnnnnnnnnnnnnnnnnnnnnnnnnnnnnnnnnnnnnnnnnnnnnnnnnnnnnnnnnnnnnnnnnnnnnnnnnnnnnnnnnnnnnnnnnnnnnnnnnnnnnnnnnnnnnnnnnnnnnnnnnnnnnnnnnnnnnnnnnnnnnnnnnnnnnnnnnnnnnnnnnnnnnnnnnnnnnnnnnnnnnnnnnnnnnnnnnnnnnnnnnnnnnnnnnnnnnnnnnnnnnnnnnnnnnnnnnnnnnnnnnnnnnnnnnnnnnnnnnnnnnnnnnnnnnnnnnnnnnnnnnnnnnnnnnnnnnnnnnnnnnnnnnnnnnnnnnnnnnnnnnnnnnnnnnnnnnnnnnnnnnnnnnnnnnnnnnnnnnnnnnnnnnnnnnnnnnnnnnnnnnnnnnnnnnnnnnnnnnnnnnnnnnnnnnnnnnnnnnnnnnnnnnnnnnnnnnnnnnnnnnnnnnnnnnnnnnnnnnnnnnnnnnnnnnnnnnnnnnnnnnnnnnnnnnnnnnnnnnnnnnnnnnnnnnnnnnnnnnnnnnnnnnnnnnnnnnnnnnnnnnnnnnnnnnnnnnnnnnnnnnnnnnnnnnnnnnnnnnnnnnnnnnnnnnnnnnnnnnnnnnnnnnnnnnnnnnnnnnnnnnnnnnnnnnnnnnnnnnnnnnnnnnnnnnnnnnnnnnnnnnnnnnnnnnnnnnnnnnnnnnnnnnnnnnnnnnnnnnnnnnnnnnnnnnnnnnnnnnnnnnnnnnnnnnnnnnnnnnnnnnnnnnnnnnnnnnnnnnnnnnnnnnnnnnnnnnnnnnnnnnnnnnnnnnnnnnnnnnnnnnnnnnnnnnnnnnnnnnnnnnnnnnnnnnnnnnnnnnnnnnnnnnnnnnnnnnnnnnnnnnnnnnnnnnnnnnnnnnnnnnnnnnnnnnnnnnnnnnnnnnnnnnnnnnnnnnnnnnnnnnnnnnnnnnnnnnnnnnnnnnnnnnnnnnnnnnnnnnnnnnnnnnnnnnnnnnnnnnnnnnnnnnnnnnnnnnnnnnnnnnnnnnnnnnnnnnnnnnnnnnnnnnnnnnnnnnnnnnnnnnnnnnnnnnnnnnnnnnnnnnnnnnnnnnnnnnnnnnnnnnnnnnnnnnnnnnnnnnnnnnnnnnnnnnnnnnnnnnnnnnnnnnnnnnnnnnnnnnnnnnnnnnnnnnnnnnnnnnnnnnnnnnnnnnnnnnnnnnnnnnnnnnnnnnnnnnnnnnnnnnnnnnnnnnnnnnnnnnnnnnnnnnnnnnnnnnnnnnnnnnnnnnnnnnnnnnnnnnnnnnnnnnnnnnnnnnnnnnnnnnnnnnnnnnnnnnnnnnnnnnnnnnnnnnnnnnnnnnnnnnnnnnnnnnnnnnnnnnnnnnnnnnnnnnnnnnnnnnnnnnnnnnnnnnnnnnnnnnnnnnnnnnnnnnnnnnnnnnnnnnnnnnnnnnnnnnnnnnnnnnnnnnnnnnnnnnnnnnnnnnnnnnnnnnnnnnnnnnnnnnnnnnnnnnnnnnnnnnnnnnnnnnnnnnnnnnnnnnnnnnnnnnnnnnnnnnnnnnnnnnnnnnnnnnnnnnnnnnnnnnnnnnnnnnnnnnnnnnnnnnnnnnnnnnnnnnnnnnnnnnnnnnnnnnnnnnnnnnnnnnnnnnnnnnnnnnnnnnnnnnnnnnnnnnnnnnnnnnnnnnnnnnnnnnnnnnnnnnnnnnnnnnnnnnnnnnnnnnnnnnnnnnnnnnnnnnnnnnnnnnnnnnnnnnnnnnnnnnnnnnnnnnnnnnnnnnnnnnnnnnnnnnnnnnnnnnnnnnnnnnnnnnnnnnnnnnnnnnnnnnnnnnnnnnnnnnnnnnnnnnnnnnnnnnnnnnnnnnnnnnnnnnnnnnnnnnnnnnnnnnnnnnnnnnnnnnnnnnnnnnnnnnnnnnnnnnnnnnnnnnnnnnnnnnnnnnnnnnnnnnnnnnnnnnnnnnnnnnnnnnnnnnnnnnnnnnnnnnnnnnnnnnnnnnnnnnnnnnnnnnnnnnnnnnnnnnnnnnnnnnnnnnnnnnnnnnnnnnnnnnnnnnnnnnnnnnnnnnnnnnnnnnnnnnnnnnnnnnnnnnnnnnnnnnnnnnnnnnnnnnnnnnnnnnnnnnnnnnnnnnnnnnnnnnnnnnnnnnnnnnnnnnnnnnnnnnnnnnnnnnnnnnnnnnnnnnnnnnnnnnnnnnnnnnnnnnnnnnnnnnnnnnnnnnnnnnnnnnnnnnnnnnnnnnnnnnnnnnnnnnnnnnnnnnnnnnnnnnnnnnnnnnnnnnnnnnnnnnnnnnnnnnnnnnnnnnnnnnnnnnnnnnnnnnnnnnnnnnnnnnnnnnnnnnnnnnnnnnnnnnnnnnnnnnnnnnnnnnnnnnnnnnnnnnnnnnnnnnnnnnnnnnnnnnnnnnnnnnnnnnnnnnnnnnnnnnnnnnnnnnnnnnnnnnnnnnnnnnnnnnnnnnnnnnnnnnnnnnnnnnnnnnnnnnnnnnnnnnnnnnnnnnnnnnnnnnnnnnnnnnnnnnnnnnnnnnnnnnnnnnnnnnnnnnnnnnnnnnnnnnnnnnnnnnnnnnnnnnnnnnnnnnnnnnnnnnnnnnnnnnnnnnnnnnnnnnnnnnnnnnnnnnnnnnnnnnnnnnnnnnnnnnnnnnnnnnnnnnnnnnnnnnnnnnnnnnnnnnnnnnnnnnnnnnnnnnnnnnnnnnnnnnnnnnnnnnnnnnnnnnnnnnnnnnnnnnnnnnnnnnnnnnnnnnnnnnnnnnnnnnnnnnnnnnnnnnnnnnnnnnnnnnnnnnnnnnnnnnnnnnnnnnnnnnnnnnnnnnnnnnnnnnnnnnnnnnnnnnnnnnnnnnnnnnnnnnnnnnnnnnnnnnnnnnnnnnnnnnnnnnnnnnnnnnnnnnnnnnnnnnnnnnnnnnnnnnnnnnnnnnnnnnnnnnnnnnnnnnnnnnnnnnnnnnnnnnnnnnnnnnnnnnnnnnnnnnnnnnnnnnnnnnnnnnnnnnnnnnnnnnnnnnnnnnnnnnnnnnnnnnnnnnnnnnnnnnnnnnnnnnnnnnnnnnnnnnnnnnnnnnnnnnnnnnnnnnnnnnnnnnnnnnnnnnnnnnnnnnnnnnnnnnnnnnnnnnnnnnnnnnnnnnnnnnnnnnnnnnnnnnnnnnnnnnnnnnnnnnnnnnnnnnnnnnnnnnnnnnnnnnnnnnnnnnnnnnnnnnnnnnnnnnnnnnnnnnnnnnnnnnnnnnnnnnnnnnnnnnnnnnnnnnnnnnnnnnnnnnnnnnnnnnnnnnnnnnnnnnnnnnnnnnnnnnnnnnnnnnnnnnnnnnnnnnnnnnnnnnnnnnnnnnnnnnnnnnnnnnnnnnnnnnnnnnnnnnnnnnnnnnnnnnnnnnnnnnnnnnnnnnnnnnnnnnnnnnnnnnnnnnnnnnnnnnnnnnnnnnnnnnnnnnnnnnnnnnnnnnnnnnnnnnnnnnnnnnnnnnnnnnnnnnnnnnnnnnnnnnnnnnnnnnnnnnnnnnnnnnnnnnnnnnnnnnnnnnnnnnnnnnnnnnnnnnnnnnnnnnnnnnnnnnnnnnnnnnnnnnnnnnnnnnnnnnnnnnnnnnnnnnnnnnnnnnnnnnnnnnnnnnnnnnnnnnnnnnnnnnnnnnnnnnnnnnnnnnnnnnnnnnnnnnnnnnnnnnnnnnnnnnnnnnnnnnnnnnnnnnnnnnnnnnnnnnnnnnnnnnnnnnnnnnnnnnnnnnnnnnnnnnnnnnnnnnnnnnnnnnnnnnnnnnnnnnnnnnnnnnnnnnnnnnnnnnnnnnnnnnnnnnnnnnnnnnnnnnnnnnnnnnnnnnnnnnnnnnnnnnnnnnnnnnnnnnnnnnnnnnnnnnnnnnnnnnnnnnnnnnnnnnnnnnnnnnnnnnnnnnnnnnnnnnnnnnnnnnnnnnnnnnnnnnnnnnnnnnnnnnnnnnnnnnnnnnnnnnnnnnnnnnnnnnnnnnnnnnnnnnnnnnnnnnnnnnnnnnnnnnnnnnnnnnnnnnnnnnnnnnnnnnnnnnnnnnnnnnnnnnnnnnnnnnnnnnnnnnnnnnnnnnnnnnnnnnnnnnnnnnnnnnnnnnnnnnnnnnnnnnnnnnnnnnnnnnnnnnnnnnnnnnnnnnnnnnnnnnnnnnnnnnnnnnnnnnnnnnnnnnnnnnnnnnnnnnnnnnnnnnnnnnnnnnnnnnnnnnnnnnnnnnnnnnnnnnnnnnnnnnnnnnnnnnnnnnnnnnnnnnnnnnnnnnnnnnnnnnnnnnnnnnnnnnnnnnnnnnnnnnnnnnnnnnnnnnnnnnnnnnnnnnnnnnnnnnnnnnnnnnnnnnnnnnnnnnnnnnnnnnnnnnnnnnnnnnnnnnnnnnnnnnnnnnnnnnnnnnnnnnnnnnnnnnnnnnnnnnnnnnnnnnnnnnnnnnnnnnnnnnnnnnnnnnnnnnnnnnnnnnnnnnnnnnnnnnnnnnnnnnnnnnnnnnnnnnnnnnnnnnnnnnnnnnnnnnnnnnnnnnnnnnnnnnnnnnnnnnnnnnnnnnnnnnnnnnnnnnnnnnnnnnnnnnnnnnnnnnnnnnnnnnnnnnnnnnnnnnnnnnnnnnnnnnnnnnnnnnnnnnnnnnnnnnnnnnnnnnnnnnnnnnnnnnnnnnnnnnnnnnnnnnnnnnnnnnnnnnnnnnnnnnnnnnnnnnnnnnnnnnnnnnnnnnnnnnnnnnnnnnnnnnnnnnnnnnnnnnnnnnnnnnnnnnnnnnnnnnnnnnnnnnnnnnnnnnnnnnnnnnnnnnnnnnnnnnnnnnnnnnnnnnnnnnnnnnnnnnnnnnnnnnnnnnnnnnnnnnnnnnnnnnnnnnnnnnnnnnnnnnnnnnnnnnnnnnnnnnnnnnnnnnnnnnnnnnnnnnnnnnnnnnnnnnnnnnnnnnnnnnnnnnnnnnnnnnnnnnnnnnnnnnnnnnnnnnnnnnnnnnnnnnnnnnnnnnnnnnnnnnnnnnnnnnnnnnnnnnnnnnnnnnnnnnnnnnnnnnnnnnnnnnnnnnnnnnnnnnnnnnnnnnnnnnnnnnnnnnnnnnnnnnnnnnnnnnnnnnnnnnnnnnnnnnnnnnnnnnnnnnnnnnnnnnnnnnnnnnnnnnnnnnnnnnnnnnnnnnnnnnnnnnnnnnnnnnnnnnnnnnnnnnnnnnnnnnnnnnnnnnnnnnnnnnnnnnnnnnnnnnnnnnnnnnnnnnnnnnnnnnnnnnnnnnnnnnnnnnnnnnnnnnnnnnnnnnnnnnnnnnnnnnnnnnnnnnnnnnnnnnnnnnnnnnnnnnnnnnnnnnnnnnnnnnnnnnnnnnnnnnnnnnnnnnnnnnnnnnnnnnnnnnnnnnnnnnnnnnnnnnnnnnnnnnnnnnnnnnnnnnnnnnnnnnnnnnnnnnnnnnnnnnnnnnnnnnnnnnnnnnnnnnnnnnnnnnnnnnnnnnnnnnnnnnnnnnnnnnnnnnnnnnnnnnnnnnnnnnnnnnnnnnnnnnnnnnnnnnnnnnnnnnnnnnnnnnnnnnnnnnnnnnnnnnnnnnnnnnnnnnnnnnnnnnnnnnnnnnnnnnnnnnnnnnnnnnnnnnnnnnnnnnnnnnnnnnnnnnnnnnnnnnnnnnnnnnnnnnnnnnnnnnnnnnnnnnnnnnnnnnnnnnnnnnnnnnnnnnnnnnnnnnnnnnnnnnnnnnnnnnnnnnnnnnnnnnnnnnnnnnnnnnnnnnnnnnnnnnnnnnnnnnnnnnnnnnnnnnnnnnnnnnnnnnnnnnnnnnnnnnnnnnnnnnnnnnnnnnnnnnnnnnnnnnnnnnnnnnnnnnnnnnnnnnnnnnnnnnnnnnnnnnnnnnnnnnnnnnnnnnnnnnnnnnnnnnnnnnnnnnnnnnnnnnnnnnnnnnnnnnnnnnnnnnnnnnnnnnnnnnnnnnnnnnnnnnnnnnnnnnnnnnnnnnnnnnnnnnnnnnnnnnnnnnnnnnnnnnnnnnnnnnnnnnnnnnnnnnnnnnnnnnnnnnnnnnnnnnnnnnnnnnnnnnnnnnnnnnnnnnnnnnnnnnnnnnnnnnnnnnnnnnnnnnnnnnnnnnnnnnnnnnnnnnnnnnnnnnnnnnnnnnnnnnnnnnnnnnnnnnnnnnnnnnnnnnnnnnnnnnnnnnnnnnnnnnnnnnnnnnnnnnnnnnnnnnnnnnnnnnnnnnnnnnnnnnnnnnnnnnnnnnnnnnnnnnnnnnnnnnnnnnnnnnnnnnnnnnnnnnnnnnnnnnnnnnnnnnnnnnnnnnnnnnnnnnnnnnnnnnnnnnnnnnnnnnnnnnnnnnnnnnnnnnnnnnnnnnnnnnnnnnnnnnnnnnnnnnnnnnnnnnnnnnnnnnnnnnnnnnnnnnnnnnnnnnnnnnnnnnnnnnnnnnnnnnnnnnnnnnnnnnnnnnnnnnnnnnnnnnnnnnnnnnnnnnnnnnnnnnnnnnnnnnnnnnnnnnnnnnnnnnnnnnnnnnnnnnnnnnnnnnnnnnnnnnnnnnnnnnnnnnnnnnnnnnnnnnnnnnnnnnnnnnnnnnnnnnnnnnnnnnnnnnnnnnnnnnnnnnnnnnnnnnnnnnnnnnnnnnnnnnnnnnnnnnnnnnnnnnnnnnnnnnnnnnnnnnnnnnnnnnnnnnnnnnnnnnnnnnnnnnnnnnnnnnnnnnnnnnnnnnnnnnnnnnnnnnnnnnnnnnnnnnnnnnnnnnnnnnnnnnnnnnnnnnnnnnnnnnnnnnnnnnnnnnnnnnnnnnnnnnnnnnnnnnnnnnnnnnnnnnnnnnnnnnnnnnnnnnnnnnnnnnnnnnnnnnnnnnnnnnnnnnnnnnnnnnnnnnnnnnnnnnnnnnnnnnnnnnnnnnnnnnnnnnnnnnnnnnnnnnnnnnnnnnnnnnnnnnnnnnnnnnnnnnnnnnnnnnnnnnnnnnnnnnnnnnnnnnnnnnnnnnnnnnnnnnnnnnnnnnnnnnnnnnnnnnnnnnnnnnnnnnnnnnnnnnnnnnnnnnnnnnnnnnnnnnnnnnnnnnnnnnnnnnnnnnnnnnnnnnnnnnnnnnnnnnnnnnnnnnnnnnnnnnnnnnnnnnnnnnnnnnnnnnnnnnnnnnnnnnnnnnnnnnnnnnnnnnnnnnnnnnnnnnnnnnnnnnnnnnnnnnnnnnnnnnnnnnnnnnnnnnnnnnnnnnnnnnnnnnnnnnnnnnnnnnnnnnnnnnnnnnnnnnnnnnnnnnnnnnnnnnnnnnnnnnnnnnnnnnnnnnnnnnnnnnnnnnnnnnnnnnnnnnnnnnnnnnnnnnnnnnnnnnnnnnnnnnnnnnnnnnnnnnnnnnnnnnnnnnnnnnnnnnnnnnnnnnnnnnnnnnnnnnnnnnnnnnnnnnnnnnnnnnnnnnnnnnnnnnnnnnnnnnnnnnnnnnnnnnnnnnnnnnnnnnnnnnnnnnnnnnnnnnnnnnnnnnnnnnnnnnnnnnnnnnnnnnnnnnnnnnnnnnnnnnnnnnnnnnnnnnnnnnnnnnnnnnnnnnnnnnnnnnnnnnnnnnnnnnnnnnnnnnnnnnnnnnnnnnnnnnnnnnnnnnnnnnnnnnnnnnnnnnnnnnnnnnnnnnnnnnnnnnnnnnnnnnnnnnnnnnnnnnnnnnnnnnnnnnnnnnnnnnnnnnnnnnnnnnnnnnnnnnnnnnnnnnnnnnnnnnnnnnnnnnnnnnnnnnnnnnnnnnnnnnnnnnnnnnnnnnnnnnnnnnnnnnnnnnnnnnnnnnnnnnnnnnnnnnnnnnnnnnnnnnnnnnnnnnnnnnnnnnnnnnnnnnnnnnnnnnnnnnnnnnnnnnnnnnnnnnnnnnnnnnnnnnnnnnnnnnnnnnnnnnnnnnnnnnnnnnnnnnnnnnnnnnnnnnnnnnnnnnnnnnnnnnnnnnnnnnnnnnnnnnnnnnnnnnnnnnnnnnnnnnnnnnnnnnnnnnnnnnnnnnnnnnnnnnnnnnnnnnnnnnnnnnnnnnnnnnnnnnnnnnnnnnnnnnnnnnnnnnnnnnnnnnnnnnnnnnnnnnnnnnnnnnnnnnnnnnnnnnnnnnnnnnnnnnnnnnnnnnnnnnnnnnnnnnnnnnnnnnnnnnnnnnnnnnnnnnnnnnnnnnnnnnnnnnnnnnnnnnnnnnnnnnnnnnnnnnnnnnnnnnnnnnnnnnnnnnnnnnnnnnnnnnnnnnnnnnnnnnnnnnnnnnnnnnnnnnnnnnnnnnnnnnnnnnnnnnnnnnnnnnnnnnnnnnnnnnnnnnnnnnnnnnnnnnnnnnnnnnnnnnnnnnnnnnnnnnnnnnnnnnnnnnnnnnnnnnnnnnnnnnnnnnnnnnnnnnnnnnnnnnnnnnnnnnnnnnnnnnnnnnnnnnnnnnnnnnnnnnnnnnnnnnnnnnnnnnnnnnnnnnnnnnnnnnnnnnnnnnnnnnnnnnnnnnnnnnnnnnnnnnnnnnnnnnnnnnnnnnnnnnnnnnnnnnnnnnnnnnnnnnnnnnnnnnnnnnnnnnnnnnnnnnnnnnnnnnnnnnnnnnnnnnnnnnnnnnnnnnnnnnnnnnnnnnnnnnnnnnnnnnnnnnnnnnnnnnnnnnnnnnnnnnnnnnnnnnnnnnnnnnnnnnnnnnnnnnnnnnnnnnnnnnnnnnnnnnnnnnnnnnnnnnnnnnnnnnnnnnnnnnnnnnnnnnnnnnnnnnnnnnnnnnnnnnnnnnnnnnnnnnnnnnnnnnnnnnnnnnnnnnnnnnnnnnnnnnnnnnnnnnnnnnnnnnnnnnnnnnnnnnnnnnnnnnnnnnnnnnnnnnnnnnnnnnnnnnnnnnnnnnnnnnnnnnnnnnnnnnnnnnnnnnnnnnnnnnnnnnnnnnnnnnnnnnnnnnnnnnnnnnnnnnnnnnnnnnnnnnnnnnnnnnnnnnnnnnnnnnnnnnnnnnnnnnnnnnnnnnnnnnnnnnnnnnnnnnnnnnnnnnnnnnnnnnnnnnnnnnnnnnnnnnnnnnnnnnnnnnnnnnnnnnnnnnnnnnnnnnnnnnnnnnnnnnnnnnnnnnnnnnnnnnnnnnnnnnnnnnnnnnnnnnnnnnnnnnnnnnnnnnnnnnnnnnnnnnnnnnnnnnnnnnnnnnnnnnnnnnnnnnnnnnnnnnnnnnnnnnnnnnnnnnnnnnnnnnnnnnnnnnnnnnnnnnnnnnnnnnnnnnnnnnnnnnnnnnnnnnnnnnnnnnnnnnnnnnnnnnnnnnnnnnnnnnnnnnnnnnnnnnnnnnnnnnnnnnnnnnnnnnnnnnnnnnnnnnnnnnnnnnnnnnnnnnnnnnnnnnnnnnnnnnnnnnnnnnnnnnnnnnnnnnnnnnnnnnnnnnnnnnnnnnnnnnnnnnnnnnnnnnnnnnnnnnnnnnnnnnnnnnnnnnnnnnnnnnnnnnnnnnnnnnnnnnnnnnnnnnnnnnnnnnnnnnnnnnnnnnnnnnnnnnnnnnnnnnnnnnnnnnnnnnnnnnnnnnnnnnnnnnnnnnnnnnnnnnnnnnnnnnnnnnnnnnnnnnnnnnnnnnnnnnnnnnnnnnnnnnnnnnnnnnnnnnnnnnnnnnnnnnnnnnnnnnnnnnnnnnnnnnnnnnnnnnnnnnnnnnnnnnnnnnnnnnnnnnnnnnnnnnnnnnnnnnnnnnnnnnnnnnnnnnnnnnnnnnnnnnnnnnnnnnnnnnnnnnnnnnnnnnnnnnnnnnnnnnnnnnnnnnnnnnnnnnnnnnnnnnnnnnnnnnnnnnnnnnnnnnnnnnnnnnnnnnnnnnnnnnnnnnnnnnnnnnnnnnnnnnnnnnnnnnnnnnnnnnnnnnnnnnnnnnnnnnnnnnnnnnnnnnnnnnnnnnnnnnnnnnnnnnnnnnnnnnnnnnnnnnnnnnnnnnnnnnnnnnnnnnnnnnnnnnnnnnnnnnnnnnnnnnnnnnnnnnnnnnnnnnnnnnnnnnnnnnnnnnnnnnnnnnnnnnnnnnnnnnnnnnnnnnnnnnnnnnnnnnnnnnnnnnnnnnnnnnnnnnnnnnnnnnnnnnnnnnnnnnnnnnnnnnnnnnnnnnnnnnnnnnnnnnnnnnnnnnnnnnnnnnnnnnnnnnnnnnnnnnnnnnnnnnnnnnnnnnnnnnnnnnnnnnnnnnnnnnnnnnnnnnnnnnnnnnnnnnnnnnnnnnnnnnnnnnnnnnnnnnnnnnnnnnnnnnnnnnnnnnnnnnnnnnnnnnnnnnnnnnnnnnnnnnnnnnnnnnnnnnnnnnnnnnnnnnnnnnnnnnnnnnnnnnnnnnnnnnnnnnnnnnnnnnnnnnnnnnnnnnnnnnnnnnnnnnnnnnnnnnnnnnnnnnnnnnnnnnnnnnnnnnnnnnnnnnnnnnnnnnnnnnnnnnnnnnnnnnnnnnnnnnnnnnnnnnnnnnnnnnnnnnnnnnnnnnnnnnnnnnnnnnnnnnnnnnnnnnnnnnnnnnnnnnnnnnnnnnnnnnnnnnnnnnnnnnnnnnnnnnnnnnnnnnnnnnnnnnnnnnnnnnnnnnnnnnnnnnnnnnnnnnnnnnnnnnnnnnnnnnnnnnnnnnnnnnnnnnnnnnnnnnnnnnnnnnnnnnnnnnnnnnnnnnnnnnnnnnnnnnnnnnnnnnnnnnnnnnnnnnnnnnnnnnnnnnnnnnnnnnnnnnnnnnnnnnnnnnnnnnnnnnnnnnnnnnnnnnnnnnnnnnnnnnnnnnnnnnnnnnnnnnnnnnnnnnnnnnnnnnnnnnnnnnnnnnnnnnnnnnnnnnnnnnnnnnnnnnnnnnnnnnnnnnnnnnnnnnnnnnnnnnnnnnnnnnnnnnnnnnnnnnnnnnnnnnnnnnnnnnnnnnnnnnnnnnnnnnnnnnnnnnnnnnnnnnnnnnnnnnnnnnnnnnnnnnnnnnnnnnnnnnnnnnnnnnnnnnnnnnnnnnnnnnnnnnnnnnnnnnnnnnnnnnnnnnnnnnnnnnnnnnnnnnnnnnnnnnnnnnnnnnnnnnnnnnnnnnnnnnnnnnnnnnnnnnnnnnnnnnnnnnnnnnnnnnnnnnnnnnnnnnnnnnnnnnnnnnnnnnnnnnnnnnnnnnnnnnnnnnnnnnnnnnnnnnnnnnnnnnnnnnnnnnnnnnnnnnnnnnnnnnnnnnnnnnnnnnnnnnnnnnnnnnnnnnnnnnnnnnnnnnnnnnnnnnnnnnnnnnnnnnnnnnnnnnnnnnnnnnnnnnnnnnnnnnnnnnnnnnnnnnnnnnnnnnnnnnnnnnnnnnnnnnnnnnnnnnnnnnnnnnnnnnnnnnnnnnnnnnnnnnnnnnnnnnnnnnnnnnnnnnnnnnnnnnnnnnnnnnnnnnnnnnnnnnnnnnnnnnnnnnnnnnnnnnnnnnnnnnnnnnnnnnnnnnnnnnnnnnnnnnnnnnnnnnnnnnnnnnnnnnnnnnnnnnnnnnnnnnnnnnnnnnnnnnnnnnnnnnnnnnnnnnnnnnnnnnnnnnnnnnnnnnnnnnnnnnnnnnnnnnnnnnnnnnnnnnnnnnnnnnnnnnnnnnnnnnnnnnnnnnnnnnnnnnnnnnnnnnnnnnnnnnnnnnnnnnnnnnnnnnnnnnnnnnnnnnnnnnnnnnnnnnnnnnnnnnnnnnnnnnnnnnnnnnnnnnnnnnnnnnnnnnnnnnnnnnnnnnnnnnnnnnnnnnnnnnnnnnnnnnnnnnnnnnnnnnnnnnnnnnnnnnnnnnnnnnnnnnnnnnnnnnnnnnnnnnnnnnnnnnnnnnnnnnnnnnnnnnnnnnnnnnnnnnnnnnnnnnnnnnnnnnnnnnnnnnnnnnnnnnnnnnnnnnnnnnnnnnnnnnnnnnnnnnnnnnnnnnnnnnnnnnnnnnnnnnnnnnnnnnnnnnnnnnnnnnnnnnnnnnnnnnnnnnnnnnnnnnnnnnnnnnnnnnnnnnnnnnnnnnnnnnnnnnnnnnnnnnnnnnnnnnnnnnnnnnnnnnnnnnnnnnnnnnnnnnnnnnnnnnnnnnnnnnnnnnnnnnnnnnnnnnnnnnnnnnnnnnnnnnnnnnnnnnnnnnnnnnnnnnnnnnnnnnnnnnnnnnnnnnnnnnnnnnnnnnnnnnnnnnnnnnnnnnnnnnnnnnnnnnnnnnnnnnnnnnnnnnnnnnnnnnnnnnnnnnnnnnnnnnnnnnnnnnnnnnnnnnnnnnnnnnnnnnnnnnnnnnnnnnnnnnnnnnnnnnnnnnnnnnnnnnnnnnnnnnnnnnnnnnnnnnnnnnnnnnnnnnnnnnnnnnnnnnnnnnnnnnnnnnnnnnnnnnnnnnnnnnnnnnnnnnnnnnnnnnnnnnnnnnnnnnnnnnnnnnnnnnnnnnnnnnnnnnnnnnnnnnnnnnnnnnnnnnnnnnnnnnnnnnnnnnnnnnnnnnnnnnnnnnnnnnnnnnnnnnnnnnnnnnnnnnnnnnnnnnnnnnnnnnnnnnnnnnnnnnnnnnnnnnnnnnnnnnnnnnnnnnnnnnnnnnnnnnnnnnnnnnnnnnnnnnnnnnnnnnnnnnnnnnnnnnnnnnnnnnnnnnnnnnnnnnnnnnnnnnnnnnnnnnnnnnnnnnnnnnnnnnnnnnnnnnnnnnnnnnnnnnnnnnnnnnnnnnnnnnnnnnnnnnnnnnnnnnnnnnnnnnnnnnnnnnnnnnnnnnnnnnnnnnnnnnnnnnnnnnnnnnnnnnnnnnnnnnnnnnnnnnnnnnnnnnnnnnnnnnnnnnnnnnnnnnnnnnnnnnnnnnnnnnnnnnnnnnnnnnnnnnnnnnnnnnnnnnnnnnnnnnnnnnnnnnnnnnnnnnnnnnnnnnnnnnnnnnnnnnnnnnnnnnnnnnnnnnnnnnnnnnnnnnnnnnnnnnnnnnnnnnnnnnnnnnnnnnnnnnnnnnnnnnnnnnnnnnnnnnnnnnnnnnnnnnnnnnnnnnnnnnnnnnnnnnnnnnnnnnnnnnnnnnnnnnnnnnnnnnnnnnnnnnnnnnnnnnnnnnnnnnnnnnnnnnnnnnnnnnnnnnnnnnnnnnnnnnnnnnnnnnnnnnnnnnnnnnnnnnnnnnnnnnnnnnnnnnnnnnnnnnnnnnnnnnnnnnnnnnnnnnnnnnnnnnnnnnnnnnnnnnnnnnnnnnnnnnnnnnnnnnnnnnnnnnnnnnnnnnnnnnnnnnnnnnnnnnnnnnnnnnnnnnnnnnnnnnnnnnnnnnnnnnnnnnnnnnnnnnnnnnnnnnnnnnnnnnnnnnnnnnnnnnnnnnnnnnnnnnnnnnnnnnnnnnnnnnnnnnnnnnnnnnnnnnnnnnnnnnnnnnnnnnnnnnnnnnnnnnnnnnnnnnnnnnnnnnnnnnnnnnnnnnnnnnnnnnnnnnnnnnnnnnnnnnnnnnnnnnnnnnnnnnnnnnnnnnnnnnnnnnnnnnnnnnnnnnnnnnnnnnnnnnnnnnnnnnnnnnnnnnnnnnnnnnnnnnnnnnnnnnnnnnnnnnnnnnnnnnnnnnnnnnnnnnnnnnnnnnnnnnnnnnnnnnnnnnnnnnnnnnnnnnnnnnnnnnnnnnnnnnnnnnnnnnnnnnnnnnnnnnnnnnnnnnnnnnnnnnnnnnnnnnnnnnnnnnnnnnnnnnnnnnnnnnnnnnnnnnnnnnnnnnnnnnnnnnnnnnnnnnnnnnnnnnnnnnnnnnnnnnnnnnnnnnnnnnnnnnnnnnnnnnnnnnnnnnnnnnnnnnnnnnnnnnnnnnnnnnnnnnnnnnnnnnnnnnnnnnnnnnnnnnnnnnnnnnnnnnnnnnnnnnnnnnnnnnnnnnnnnnnnnnnnnnnnnnnnnnnnnnnnnnnnnnnnnnnnnnnnnnnnnnnnnnnnnnnnnnnnnnnnnnnnnnnnnnnnnnnnnnnnnnnnnnnnnnnnnnnnnnnnnnnnnnnnnnnnnnnnnnnnnnnnnnnnnnnnnnnnnnnnnnnnnnnnnnnnnnnnnnnnnnnnnnnnnnnnnnnnnnnnnnnnnnnnnnnnnnnnnnnnnnnnnnnnnnnnnnnnnnnnnnnnnnnnnnnnnnnnnnnnnnnnnnnnnnnnnnnnnnnnnnnnnnnnnnnnnnnnnnnnnnnnnnnnnnnnnnnnnnnnnnnnnnnnnnnnnnnnnnnnnnnnnnnnnnnnnnnnnnnnnnnnnnnnnnnnnnnnnnnnnnnnnnnnnnnnnnnnnnnnnnnnnnnnnnnnnnnnnnnnnnnnnnnnnnnnnnnnnnnnnnnnnnnnnnnnnnnnnnnnnnnnnnnnnnnnnnnnnnnnnnnnnnnnnnnnnnnnnnnnnnnnnnnnnnnnnnnnnnnnnnnnnnnnnnnnnnnnnnnnnnnnnnnnnnnnnnnnnnnnnnnnnnnnnnnnnnnnnnnnnnnnnnnnnnnnnnnnnnnnnnnnnnnnnnnnnnnnnnnnnnnnnnnnnnnnnnnnnnnnnnnnnnnnnnnnnnnnnnnnnnnnnnnnnnnnnnnnnnnnnnnnnnnnnnnnnnnnnnnnnnnnnnnnnnnnnnnnnnnnnnnnnnnnnnnnnnnnnnnnnnnnnnnnnnnnnnnnnnnnnnnnnnnnnnnnnnnnnnnnnnnnnnnnnnnnnnnnnnnnnnnnnnnnnnnnnnnnnnnnnnnnnnnnnnnnnnnnnnnnnnnnnnnnnnnnnnnnnnnnnnnnnnnnnnnnnnnnnnnnnnnnnnnnnnnnnnnnnnnnnnnnnnnnnnnnnnnnnnnnnnnnnnnnnnnnnnnnnnnnnnnnnnnnnnnnnnnnnnnnnnnnnnnnnnnnnnnnnnnnnnnnnnnnnnnnnnnnnnnnnnnnnnnnnnnnnnnnnnnnnnnnnnnnnnnnnnnnnnnnnnnnnnnnnnnnnnnnnnnnnnnnnnnnnnnnnnnnnnnnnnnnnnnnnnnnnnnnnnnnnnnnnnnnnnnnnnnnnnnnnnnnnnnnnnnnnnnnnnnnnnnnnnnnnnnnnnnnnnnnnnnnnnnnnnnnnnnnnnnnnnnnnnnnnnnnnnnnnnnnnnnnnnnnnnnnnnnnnnnnnnnnnnnnnnnnnnnnnnnnnnnnnnnnnnnnnnnnnnnnnnnnnnnnnnnnnnnnnnnnnnnnnnnnnnnnnnnnnnnnnnnnnnnnnnnnnnnnnnnnnnnnnnnnnnnnnnnnnnnnnnnnnnnnnnnnnnnnnnnnnnnnnnnnnnnnnnnnnnnnnnnnnnnnnnnnnnnnnnnnnnnnnnnnnnnnnnnnnnnnnnnnnnnnnnnnnnnnnnnnnnnnnnnnnnnnnnnnnnnnnnnnnnnnnnnnnnnnnnnnnnnnnnnnnnnnnnnnnnnnnnnnnnnnnnnnnnnnnnnnnnnnnnnnnnnnnnnnnnnnnnnnnnnnnnnnnnnnnnnnnnnnnnnnnnnnnnnnnnnnnnnnnnnnnnnnnnnnnnnnnnnnnnnnnnnnnnnnnnnnnnnnnnnnnnnnnnnnnnnnnnnnnnnnnnnnnnnnnnnnnnnnnnnnnnnnnnnnnnnnnnnnnnnnnnnnnnnnnnnnnnnnnnnnnnnnnnnnnnnnnnnnnnnnnnnnnnnnnnnnnnnnnnnnnnnnnnnnnnnnnnnnnnnnnnnnnnnnnnnnnnnnnnnnnnnnnnnnnnnnnnnnnnnnnnnnnnnnnnnnnnnnnnnnnnnnnnnnnnnnnnnnnnnnnnnnnnnnnnnnnnnnnnnnnnnnnnnnnnnnnnnnnnnnnnnnnnnnnnnnnnnnnnnnnnnnnnnnnnnnnnnnnnnnnnnnnnnnnnnnnnnnnnnnnnnnnnnnnnnnnnnnnnnnnnnnnnnnnnnnnnnnnnnnnnnnnnnnnnnnnnnnnnnnnnnnnnnnnnnnnnnnnnnnnnnnnnnnnnnnnnnnnnnnnnnnnnnnnnnnnnnnnnnnnnnnnnnnnnnnnnnnnnnnnnnnnnnnnnnnnnnnnnnnnnnnnnnnnnnnnnnnnnnnnnnnnnnnnnnnnnnnnnnnnnnnnnnnnnnnnnnnnnnnnnnnnnnnnnnnnnnnnnnnnnnnnnnnnnnnnnnnnnnnnnnnnnnnnnnnnnnnnnnnnnnnnnnnnnnnnnnnnnnnnnnnnnnnnnnnnnnnnnnnnnnnnnnnnnnnnnnnnnnnnnnnnnnnnnnnnnnnnnnnnnnnnnnnnnnnnnnnnnnnnnnnnnnnnnnnnnnnnnnnnnnnnnnnnnnnnnnnnnnnnnnnnnnnnnnnnnnnnnnnnnnnnnnnnnnnnnnnnnnnnnnnnnnnnnnnnnnnnnnnnnnnnnnnnnnnnnnnnnnnnnnnnnnnnnnnnnnnnnnnnnnnnnnnnnnnnnnnnnnnnnnnnnnnnnnnnnnnnnnnnnnnnnnnnnnnnnnnnnnnnnnnnnnnnnnnnnnnnnnnnnnnnnnnnnnnnnnnnnnnnnnnnnnnnnnnnnnnnnnnnnnnnnnnnnnnnnnnnnnnnnnnnnnnnnnnnnnnnnnnnnnnnnnnnnnnnnnnnnnnnnnnnnnnnnnnnnnnnnnnnnnnnnnnnnnnnnnnnnnnnnnnnnnnnnnnnnnnnnnnnnnnnnnnnnnnnnnnnnnnnnnnnnnnnnnnnnnnnnnnnnnnnnnnnnnnnnnnnnnnnnnnnnnnnnnnnnnnnnnnnnnnnnnnnnnnnnnnnnnnnnnnnnnnnnnnnnnnnnnnnnnnnnnnnnnnnnnnnnnnnnnnnnnnnnnnnnnnnnnnnnnnnnnnnnnnnnnnnnnnnnnnnnnnnnnnnnnnnnnnnnnnnnnnnnnnnnnnnnnnnnnnnnnnnnnnnnnnnnnnnnnnnnnnnnnnnnnnnnnnnnnnnnnnnnnnnnnnnnnnnnnnnnnnnnnnnnnnnnnnnnnnnnnnnnnnnnnnnnnnnnnnnnnnnnnnnnnnnnnnnnnnnnnnnnnnnnnnnnnnnnnnnnnnnnnnnnnnnnnnnnnnnnnnnnnnnnnnnnnnnnnnnnnnnnnnnnnnnnnnnnnnnnnnnnnnnnnnnnnnnnnnnnnnnnnnnnnnnnnnnnnnnnnnnnnnnnnnnnnnnnnnnnnnnnnnnnnnnnnnnnnnnnnnnnnnnnnnnnnnnnnnnnnnnnnnnnnnnnnnnnnnnnnnnnnnnnnnnnnnnnnnnnnnnnnnnnnnnnnnnnnnnnnnnnnnnnnnnnnnnnnnnnnnnnnnnnnnnnnnnnnnnnnnnnnnnnnnnnnnnnnnnnnnnnnnnnnnnnnnnnnnnnnnnnnnnnnnnnnnnnnnnnnnnnnnnnnnnnnnnnnnnnnnnnnnnnnnnnnnnnnnnnnnnnnnnnnnnnnnnnnnnnnnnnnnnnnnnnnnnnnnnnnnnnnnnnnnnnnnnnnnnnnnnnnnnnnnnnnnnnnnnnnnnnnnnnnnnnnnnnnnnnnnnnnnnnnnnnnnnnnnnnnnnnnnnnnnnnnnnnnnnnnnnnnnnnnnnnnnnnnnnnnnnnnnnnnnnnnnnnnnnnnnnnnnnnnnnnnnnnnnnnnnnnnnnnnnnnnnnnnnnnnnnnnnnnnnnnnnnnnnnnnnnnnnnnnnnnnnnnnnnnnnnnnnnnnnnnnnnnnnnnnnnnnnnnnnnnnnnnnnnnnnnnnnnnnnnnnnnnnnnnnnnnnnnnnnnnnnnnnnnnnnnnnnnnnnnnnnnnnnnnnnnnnnnnnnnnnnnnnnnnnnnnnnnnnnnnnnnnnnnnnnnnnnnnnnnnnnnnnnnnnnnnnnnnnnnnnnnnnnnnnnnnnnnnnnnnnnnnnnnnnnnnnnnnnnnnnnnnnnnnnnnnnnnnnnnnnnnnnnnnnnnnnnnnnnnnnnnnnnnnnnnnnnnnnnnnnnnnnnnnnnnnnnnnnnnnnnnnnnnnnnnnnnnnnnnnnnnnnnnnnnnnnnnnnnnnnnnnnnnnnnnnnnnnnnnnnnnnnnnnnnnnnnnnnnnnnnnnnnnnnnnnnnnnnnnnnnnnnnnnnnnnnnnnnnnnnnnnnnnnnnnnnnnnnnnnnnnnnnnnnnnnnnnnnnnnnnnnnnnnnnnnnnnnnnnnnnnnnnnnnnnnnnnnnnnnnnnnnnnnnnnnnnnnnnnnnnnnnnnnnnnnnnnnnnnnnnnnnnnnnnnnnnnnnnnnnnnnnnnnnnnnnnnnnnnnnnnnnnnnnnnnnnnnnnnnnnnnnnnnnnnnnnnnnnnnnnnnnnnnnnnnnnnnnnnnnnnnnnnnnnnnnnnnnnnnnnnnnnnnnnnnnnnnnnnnnnnnnnnnnnnnnnnnnnnnnnnnnnnnnnnnnnnnnnnnnnnnnnnnnnnnnnnnnnnnnnnnnnnnnnnnnnnnnnnnnnnnnnnnnnnnnnnnnnnnnnnnnnnnnnnnnnnnnnnnnnnnnnnnnnnnnnnnnnnnnnnnnnnnnnnnnnnnnnnnnnnnnnnnnnnnnnnnnnnnnnnnnnnnnnnnnnnnnnnnnnnnnnnnnnnnnnnnnnnnnnnnnnnnnnnnnnnnnnnnnnnnnnnnnnnnnnnnnnnnnnnnnnnnnnnnnnnnnnnnnnnnnnnnnnnnnnnnnnnnnnnnnnnnnnnnnnnnnnnnnnnnnnnnnnnnnnnnnnnnnnnnnnnnnnnnnnnnnnnnnnnnnnnnnnnnnnnnnnnnnnnnnnnnnnnnnnnnnnnnnnnnnnnnnnnnnnnnnnnnnnnnnnnnnnnnnnnnnnnnnnnnnnnnnnnnnnnnnnnnnnnnnnnnnnnnnnnnnnnnnnnnnnnnnnnnnnnnnnnnnnnnnnnnnnnnnnnnnnnnnnnnnnnnnnnnnnnnnnnnnnnnnnnnnnnnnnnnnnnnnnnnnnnnnnnnnnnnnnnnnnnnnnnnnnnnnnnnnnnnnnnnnnnnnnnnnnnnnnnnnnnnnnnnnnnnnnnnnnnnnnnnnnnnnnnnnnnnnnnnnnnnnnnnnnnnnnnnnnnnnnnnnnnnnnnnnnnnnnnnnnnnnnnnnnnnnnnnnnnnnnnnnnnnnnnnnnnnnnnnnnnnnnnnnnnnnnnnnnnnnnnnnnnnnnnnnnnnnnnnnnnnnnnnnnnnnnnnnnnnnnnnnnnnnnnnnnnnnnnnnnnnnnnnnnnnnnnnnnnnnnnnnnnnnnnnnnnnnnnnnnnnnnnnnnnnnnnnnnnnnnnnnnnnnnnnnnnnnnnnnnnnnnnnnnnnnnnnnnnnnnnnnnnnnnnnnnnnnnnnnnnnnnnnnnnnnnnnnnnnnnnnnnnnnnnnnnnnnnnnnnnnnnnnnnnnnnnnnnnnnnnnnnnnnnnnnnnnnnnnnnnnnnnnnnnnnnnnnnnnnnnnnnnnnnnnnnnnnnnnnnnnnnnnnnnnnnnnnnnnnnnnnnnnnnnnnnnnnnnnnnnnnnnnnnnnnnnnnnnnnnnnnnnnnnnnnnnnnnnnnnnnnnnnnnnnnnnnnnnnnnnnnnnnnnnnnnnnnnnnnnnnnnnnnnnnnnnnnnnnnnnnnnnnnnnnnnnnnnnnnnnnnnnnnnnnnnnnnnnnnnnnnnnnnnnnnnnnnnnnnnnnnnnnnnnnnnnnnnnnnnnnnnnnnnnnnnnnnnnnnnnnnnnnnnnnnnnnnnnnnnnnnnnnnnnnnnnnnnnnnnnnnnnnnnnnnnnnnnnnnnnnnnnnnnnnnnnnnnnnnnnnnnnnnnnnnnnnnnnnnnnnnnnnnnnnnnnnnnnnnnnnnnnnnnnnnnnnnnnnnnnnnnnnnnnnnnnnnnnnnnnnnnnnnnnnnnnnnnnnnnnnnnnnnnnnnnnnnnnnnnnnnnnnnnnnnnnnnnnnnnnnnnnnnnnnnnnnnnnnnnnnnnnnnnnnnnnnnnnnnnnnnnnnnnnnnnnnnnnnnnnnnnnnnnnnnnnnnnnnnnnnnnnnnnnnnnnnnnnnnnnnnnnnnnnnnnnnnnnnnnnnnnnnnnnnnnnnnnnnnnnnnnnnnnnnnnnnnnnnnnnnnnnnnnnnnnnnnnnnnnnnnnnnnnnnnnnnnnnnnnnnnnnnnnnnnnnnnnnnnnnnnnnnnnnnnnnnnnnnnnnnnnnnnnnnnnnnnnnnnnnnnnnnnnnnnnnnnnnnnnnnnnnnnnnnnnnnnnnnnnnnnnnnnnnnnnnnnnnnnnnnnnnnnnnnnnnnnnnnnnnnnnnnnnnnnnnnnnnnnnnnnnnnnnnnnnnnnnnnnnnnnnnnnnnnnnnnnnnnnnnnnnnnnnnnnnnnnnnnnnnnnnnnnnnnnnnnnnnnnnnnnnnnnnnnnnnnnnnnnnnnnnnnnnnnnnnnnnnnnnnnnnnnnnnnnnnnnnnnnnnnnnnnnnnnnnnnnnnnnnnnnnnnnnnnnnnnnnnnnnnnnnnnnnnnnnnnnnnnnnnnnnnnnnnnnnnnnnnnnnnnnnnnnnnnnnnnnnnnnnnnnnnnnnnnnnnnnnnnnnnnnnnnnnnnnnnnnnnnnnnnnnnnnnnnnnnnnnnnnnnnnnnnnnnnnnnnnnnnnnnnnnnnnnnnnnnnnnnnnnnnnnnnnnnnnnnnnnnnnnnnnnnnnnnnnnnnnnnnnnnnnnnnnnnnnnnnnnnnnnnnnnnnnnnnnnnnnnnnnnnnnnnnnnnnnnnnnnnnnnnnnnnnnnnnnnnnnnnnnnnnnnnnnnnnnnnnnnnnnnnnnnnnnnnnnnnnnnnnnnnnnnnnnnnnnnnnnnnnnnnnnnnnnnnnnnnnnnnnnnnnnnnnnnnnnnnnnnnnnnnnnnnnnnnnnnnnnnnnnnnnnnnnnnnnnnnnnnnnnnnnnnnnnnnnnnnnnnnnnnnnnnnnnnnnnnnnnnnnnnnnnnnnnnnnnnnnnnnnnnnnnnnnnnnnnnnnnnnnnnnnnnnnnnnnnnnnnnnnnnnnnnnnnnnnnnnnnnnnnnnnnnnnnnnnnnnnnnnnnnnnnnnnnnnnnnnnnnnnnnnnnnnnnnnnnnnnnnnnnnnnnnnnnnnnnnnnnnnnnnnnnnnnnnnnnnnnnnnnnnnnnnnnnnnnnnnnnnnnnnnnnnnnnnnnnnnnnnnnnnnnnnnnnnnnnnnnnnnnnnnnnnnnnnnnnnnnnnnnnnnnnnnnnnnnnnnnnnnnnnnnnnnnnnnnnnnnnnnnnnnnnnnnnnnnnnnnnnnnnnnnnnnnnnnnnnnnnnnnnnnnnnnnnnnnnnnnnnnnnnnnnnnnnnnnnnnnnnnnnnnnnnnnnnnnnnnnnnnnnnnnnnnnnnnnnnnnnnnnnnnnnnnnnnnnnnnnnnnnnnnnnnnnnnnnnnnnnnnnnnnnnnnnnnnnnnnnnnnnnnnnnnnnnnnnnnnnnnnnnnnnnnnnnnnnnnnnnnnnnnnnnnnnnnnnnnnnnnnnnnnnnnnnnnnnnnnnnnnnnnnnnnnnnnnnnnnnnnnnnnnnnnnnnnnnnnnnnnnnnnnnnnnnnnnnnnnnnnnnnnnnnnnnnnnnnnnnnnnnnnnnnnnnnnnnnnnnnnnnnnnnnnnnnnnnnnnnnnnnnnnnnnnnnnnnnnnnnnnnnnnnnnnnnnnnnnnnnnnnnnnnnnnnnnnnnnnnnnnnnnnnnnnnnnnnnnnnnnnnnnnnnnnnnnnnnnnnnnnnnnnnnnnnnnnnnnnnnnnnnnnnnnnnnnnnnnnnnnnnnnnnnnnnnnnnnnnnnnnnnnnnnnnnnnnnnnnnnnnnnnnnnnnnnnnnnnnnnnnnnnnnnnnnnnnnnnnnnnnnnnnnnnnnnnnnnnnnnnnnnnnnnnnnnnnnnnnnnnnnnnnnnnnnnnnnnnnnnnnnnnnnnnnnnnnnnnnnnnnnnnnnnnnnnnnnnnnnnnnnnnnnnnnnnnnnnnnnnnnnnnnnnnnnnnnnnnnnnnnnnnnnnnnnnnnnnnnnnnnnnnnnnnnnnnnnnnnnnnnnnnnnnnnnnnnnnnnnnnnnnnnnnnnnnnnnnnnnnnnnnnnnnnnnnnnnnnnnnnnnnnnnnnnnnnnnnnnnnnnnnnnnnnnnnnnnnnnnnnnnnnnnnnnnnnnnnnnnnnnnnnnnnnnnnnnnnnnnnnnnnnnnnnnnnnnnnnnnnnnnnnnnnnnnnnnnnnnnnnnnnnnnnnnnnnnnnnnnnnnnnnnnnnnnnnnnnnnnnnnnnnnnnnnnnnnnnnnnnnnnnnnnnnnnnnnnnnnnnnnnnnnnnnnnnnnnnnnnnnnnnnnnnnnnnnnnnnnnnnnnnnnnnnnnnnnnnnnnnnnnnnnnnnnnnnnnnnnnnnnnnnnnnnnnnnnnnnnnnnnnnnnnnnnnnnnnnnnnnnnnnnnnnnnnnnnnnnnnnnnnnnnnnnnnnnnnnnnnnnnnnnnnnnnnnnnnnnnnnnnnnnnnnnnnnnnnnnnnnnnnnnnnnnnnnnnnnnnnnnnnnnnnnnnnnnnnnnnnnnnnnnnnnnnnnnnnnnnnnnnnnnnnnnnnnnnnnnnnnnnnnnnnnnnnnnnnnnnnnnnnnnnnnnnnnnnnnnnnnnnnnnnnnnnnnnnnnnnnnnnnnnnnnnnnnnnnnnnnnnnnnnnnnnnnnnnnnnnnnnnnnnnnnnnnnnnnnnnnnnnnnnnnnnnnnnnnnnnnnnnnnnnnnnnnnnnnnnnnnnnnnnnnnnnnnnnnnnnnnnnnnnnnnnnnnnnnnnnnnnnnnnnnnnnnnnnnnnnnnnnnnnnnnnnnnnnnnnnnnnnnnnnnnnnnnnnnnnnnnnnnnnnnnnnnnnnnnnnnnnnnnnnnnnnnnnnnnnnnnnnnnnnnnnnnnnnnnnnnnnnnnnnnnnnnnnnnnnnnnnnnnnnnnnnnnnnnnnnnnnnnnnnnnnnnnnnnnnnnnnnnnnnnnnnnnnnnnnnnnnnnnnnnnnnnnnnnnnnnnnnnnnnnnnnnnnnnnnnnnnnnnnnnnnnnnnnnnnnnnnnnnnnnnnnnnnnnnnnnnnnnnnnnnnnnnnnnnnnnnnnnnnnnnnnnnnnnnnnnnnnnnnnnnnnnnnnnnnnnnnnnnnnnnnnnnnnnnnnnnnnnnnnnnnnnnnnnnnnnnnnnnnnnnnnnnnnnnnnnnnnnnnnnnnnnnnnnnnnnnnnnnnnnnnnnnnnnnnnnnnnnnnnnnnnnnnnnnnnnnnnnnnnnnnnnnnnnnnnnnnnnnnnnnnnnnnnnnnnnnnnnnnnnnnnnnnnnnnnnnnnnnnnnnnnnnnnnnnnnnnnnnnnnnnnnnnnnnnnnnnnnnnnnnnnnnnnnnnnnnnnnnnnnnnnnnnnnnnnnnnnnnnnnnnnnnnnnnnnnnnnnnnnnnnnnnnnnnnnnnnnnnnnnnnnnnnnnnnnnnnnnnnnnnnnnnnnnnnnnnnnnnnnnnnnnnnnnnnnnnnnnnnnnnnnnnnnnnnnnnnnnnnnnnnnnnnnnnnnnnnnnnnnnnnnnnnnnnnnnnnnnnnnnnnnnnnnnnnnnnnnnnnnnnnnnnnnnnnnnnnnnnnnnnnnnnnnnnnnnnnnnnnnnnnnnnnnnnnnnnnnnnnnnnnnnnnnnnnnnnnnnnnnnnnnnnnnnnnnnnnnnnnnnnnnnnnnnnnnnnnnnnnnnnnnnnnnnnnnnnnnnnnnnnnnnnnnnnnnnnnnnnnnnnnnnnnnnnnnnnnnnnnnnnnnnnnnnnnnnnnnnnnnnnnnnnnnnnnnnnnnnnnnnnnnnnnnnnnnnnnnnnnnnnnnnnnnnnnnnnnnnnnnnnnnnnnnnnnnnnnnnnnnnnnnnnnnnnnnnnnnnnnnnnnnnnnnnnnnnnnnnnnnnnnnnnnnnnnnnnnnnnnnnnnnnnnnnnnnnnnnnnnnnnnnnnnnnnnnnnnnnnnnnnnnnnnnnnnnnnnnnnnnnnnnnnnnnnnnnnnnnnnnnnnnnnnnnnnnnnnnnnnnnnnnnnnnnnnnnnnnnnnnnnnnnnnnnnnnnnnnnnnnnnnnnnnnnnnnnnnnnnnnnnnnnnnnnnnnnnnnnnnnnnnnnnnnnnnnnnnnnnnnnnnnnnnnnnnnnnnnnnnnnnnnnnnnnnnnnnnnnnnnnnnnnnnnnnnnnnnnnnnnnnnnnnnnnnnnnnnnnnnnnnnnnnnnnnnnnnnnnnnnnnnnnnnnnnnnnnnnnnnnnnnnnnnnnnnnnnnnnnnnnnnnnnnnnnnnnnnnnnnnnnnnnnnnnnnnnnnnnnnnnnnnnnnnnnnnnnnnnnnnnnnnnnnnnnnnnnnnnnnnnnnnnnnnnnnnnnnnnnnnnnnnnnnnnnnnnnnnnnnnnnnnnnnnnnnnnnnnnnnnnnnnnnnnnnnnnnnnnnnnnnnnnnnnnnnnnnnnnnnnnnnnnnnnnnnnnnnnnnnnnnnnnnnnnnnnnnnnnnnnnnnnnnnnnnnnnnnnnnnnnnnnnnnnnnnnnnnnnnnnnnnnnnnnnnnnnnnnnnnnnnnnnnnnnnnnnnnnnnnnnnnnnnnnnnnnnnnnnnnnnnnnnnnnnnnnnnnnnnnnnnnnnnnnnnnnnnnnnnnnnnnnnnnnnnnnnnnnnnnnnnnnnnnnnnnnnnnnnnnnnnnnnnnnnnnnnnnnnnnnnnnnnnnnnnnnnnnnnnnnnnnnnnnnnnnnnnnnnnnnnnnnnnnnnnnnnnnnnnnnnnnnnnnnnnnnnnnnnnnnnnnnnnnnnnnnnnnnnnnnnnnnnnnnnnnnnnnnnnnnnnnnnnnnnnnnnnnnnnnnnnnnnnnnnnnnnnnnnnnnnnnnnnnnnnnnnnnnnnnnnnnnnnnnnnnnnnnnnnnnnnnnnnnnnnnnnnnnnnnnnnnnnnnnnnnnnnnnnnnnnnnnnnnnnnnnnnnnnnnnnnnnnnnnnnnnnnnnnnnnnnnnnnnnnnnnnnnnnnnnnnnnnnnnnnnnnnnnnnnnnnnnnnnnnnnnnnnnnnnnnnnnnnnnnnnnnnnnnnnnnnnnnnnnnnnnnnnnnnnnnnnnnnnnnnnnnnnnnnnnnnnnnnnnnnnnnnnnnnnnnnnnnnnnnnnnnnnnnnnnnnnnnnnnnnnnnnnnnnnnnnnnnnnnnnnnnnnnnnnnnnnnnnnnnnnnnnnnnnnnnnnnnnnnnnnnnnnnnnnnnnnnnnnnnnnnnnnnnnnnnnnnnnnnnnnnnnnnnnnnnnnnnnnnnnnnnnnnnnnnnnnnnnnnnnnnnnnnnnnnnnnnnnnnnnnnnnnnnnnnnnnnnnnnnnnnnnnnnnnnnnnnnnnnnnnnnnnnnnnnnnnnnnnnnnnnnnnnnnnnnnnnnnnnnnnnnnnnnnnnnnnnnnnnnnnnnnnnnnnnnnnnnnnnnnnnnnnnnnnnnnnnnnnnnnnnnnnnnnnnnnnnnnnnnnnnnnnnnnnnnnnnnnnnnnnnnnnnnnnnnnnnnnnnnnnnnnnnnnnnnnnnnnnnnnnnnnnnnnnnnnnnnnnnnnnnnnnnnnnnnnnnnnnnnnnnnnnnnnnnnnnnnnnnnnnnnnnnnnnnnnnnnnnnnnnnnnnnnnnnnnnnnnnnnnnnnnnnnnnnnnnnnnnnnnnnnnnnnnnnnnnnnnnnnnnnnnnnnnnnnnnnnnnnnnnnnnnnnnnnnnnnnnnnnnnnnnnnnnnnnnnnnnnnnnnnnnnnnnnnnnnnnnnnnnnnnnnnnnnnnnnnnnnnnnnnnnnnnnnnnnnnnnnnnnnnnnnnnnnnnnnnnnnnnnnnnnnnnnnnnnnnnnnnnnnnnnnnnnnnnnnnnnnnnnnnnnnnnnnnnnnnnnnnnnnnnnnnnnnnnnnnnnnnnnnnnnnnnnnnnnnnnnnnnnnnnnnnnnnnnnnnnnnnnnnnnnnnnnnnnnnnnnnnnnnnnnnnnnnnnnnnnnnnnnnnnnnnnnnnnnnnnnnnnnnnnnnnnnnnnnnnnnnnnnnnnnnnnnnnnnnnnnnnnnnnnnnnnnnnnnnnnnnnnnnnnnnnnnnnnnnnnnnnnnnnnnnnnnnnnnnnnnnnnnnnnnnnnnnnnnnnnnnnnnnnnnnnnnnnnnnnnnnnnnnnnnnnnnnnnnnnnnnnnnnnnnnnnnnnnnnnnnnnnnnnnnnnnnnnnnnnnnnnnnnnnnnnnnnnnnnnnnnnnnnnnnnnnnnnnnnnnnnnnnnnnnnnnnnnnnnnnnnnnnnnnnnnnnnnnnnnnnnnnnnnnnnnnnnnnnnnnnnnnnnnnnnnnnnnnnnnnnnnnnnnnnnnnnnnnnnnnnnnnnnnnnnnnnnnnnnnnnnnnnnnnnnnnnnnnnnnnnnnnnnnnnnnnnnnnnnnnnnnnnnnnnnnnnnnnnnnnnnnnnnnnnnnnnnnnnnnnnnnnnnnnnnnnnnnnnnnnnnnnnnnnnnnnnnnnnnnnnnnnnnnnnnnnnnnnnnnnnnnnnnnnnnnnnnnnnnnnnnnnnnnnnnnnnnnnnnnnnnnnnnnnnnnnnnnnnnnnnnnnnnnnnnnnnnnnnnnnnnnnnnnnnnnnnnnnnnnnnnnnnnnnnnnnnnnnnnnnnnnnnnnnnnnnnnnnnnnnnnnnnnnnnnnnnnnnnnnnnnnnnnnnnnnnnnnnnnnnnnnnnnnnnnnnnnnnnnnnnnnnnnnnnnnnnnnnnnnnnnnnnnnnnnnnnnnnnnnnnnnnnnnnnnnnnnnnnnnnnnnnnnnnnnnnnnnnnnnnnnnnnnnnnnnnnnnnnnnnnnnnnnnnnnnnnnnnnnnnnnnnnnnnnnnnnnnnnnnnnnnnnnnnnnnnnnnnnnnnnnnnnnnnnnnnnnnnnnnnnnnnnnnnnnnnnnnnnnnnnnnnnnnnnnnnnnnnnnnnnnnnnnnnnnnnnnnnnnnnnnnnnnnnnnnnnnnnnnnnnnnnnnnnnnnnnnnnnnnnnnnnnnnnnnnnnnnnnnnnnnnnnnnnnnnnnnnnnnnnnnnnnnnnnnnnnnnnnnnnnnnnnnnnnnnnnnnnnnnnnnnnnnnnnnnnnnnnnnnnnnnnnnnnnnnnnnnnnnnnnnnnnnnnnnnnnnnnnnnnnnnnnnnnnnnnnnnnnnnnnnnnnnnnnnnnnnnnnnnnnnnnnnnnnnnnnnnnnnnnnnnnnnnnnnnnnnnnnnnnnnnnnnnnnnnnnnnnnnnnnnnnnnnnnnnnnnnnnnnnnnnnnnnnnnnnnnnnnnnnnnnnnnnnnnnnnnnnnnnnnnnnnnnnnnnnnnnnnnnnnnnnnnnnnnnnnnnnnnnnnnnnnnnnnnnnnnnnnnnnnnnnnnnnnnnnnnnnnnnnnnnnnnnnnnnnnnnnnnnnnnnnnnnnnnnnnnnnnnnnnnnnnnnnnnnnnnnnnnnnnnnnnnnnnnnnnnnnnnnnnnnnnnnnnnnnnnnnnnnnnnnnnnnnnnnnnnnnnnnnnnnnnnnnnnnnnnnnnnnnnnnnnnnnnnnnnnnnnnnnnnnnnnnnnnnnnnnnnnnnnnnnnnnnnnnnnnnnnnnnnnnnnnnnnnnnnnnnnnnnnnnnnnnnnnnnnnnnnnnnnnnnnnnnnnnnnnnnnnnnnnnnnnnnnnnnnnnnnnnnnnnnnnnnnnnnnnnnnnnnnnnnnnnnnnnnnnnnnnnnnnnnnnnnnnnnnnnnnnnnnnnnnnnnnnnnnnnnnnnnnnnnnnnnnnnnnnnnnnnnnnnnnnnnnnnnnnnnnnnnnnnnnnnnnnnnnnnnnnnnnnnnnnnnnnnnnnnnnnnnnnnnnnnnnnnnnnnnnnnnnnnnnnnnnnnnnnnnnnnnnnnnnnnnnnnnnnnnnnnnnnnnnnnnnnnnnnnnnnnnnnnnnnnnnnnnnnnnnnnnnnnnnnnnnnnnnnnnnnnnnnnnnnnnnnnnnnnnnnnnnnnnnnnnnnnnnnnnnnnnnnnnnnnnnnnnnnnnnnnnnnnnnnnnnnnnnnnnnnnnnnnnnnnnnnnnnnnnnnnnnnnnnnnnnnnnnnnnnnnnnnnnnnnnnnnnnnnnnnnnnnnnnnnnnnnnnnnnnnnnnnnnnnnnnnnnnnnnnnnnnnnnnnnnnnnnnnnnnnnnnnnnnnnnnnnnnnnnnnnnnnnnnnnnnnnnnnnnnnnnnnnnnnnnnnnnnnnnnnnnnnnnnnnnnnnnnnnnnnnnnnnnnnnnnnnnnnnnnnnnnnnnnnnnnnnnnnnnnnnnnnnnnnnnnnnnnnnnnnnnnnnnnnnnnnnnnnnnnnnnnnnnnnnnnnnnnnnnnnnnnnnnnnnnnnnnnnnnnnnnnnnnnnnnnnnnnnnnnnnnnnnnnnnnnnnnnnnnnnnnnnnnnnnnnnnnnnnnnnnnnnnnnnnnnnnnnnnnnnnnnnnnnnnnnnnnnnnnnnnnnnnnnnnnnnnnnnnnnnnnnnnnnnnnnnnnnnnnnnnnnnnnnnnnnnnnnnnnnnnnnnnnnnnnnnnnnnnnnnnnnnnnnnnnnnnnnnnnnnnnnnnnnnnnnnnnnnnnnnnnnnnnnnnnnnnnnnnnnnnnnnnnnnnnnnnnnnnnnnnnnnnnnnnnnnnnnnnnnnnnnnnnnnnnnnnnnnnnnnnnnnnnnnnnnnnnnnnnnnnnnnnnnnnnnnnnnnnnnnnnnnnnnnnnnnnnnnnnnnnnnnnnnnnnnnnnnnnnnnnnnnnnnnnnnnnnnnnnnnnnnnnnnnnnnnnnnnnnnnnnnnnnnnnnnnnnnnnnnnnnnnnnnnnnnnnnnnnnnnnnnnnnnnnnnnnnnnnnnnnnnnnnnnnnnnnnnnnnnnnnnnnnnnnnnnnnnnnnnnnnnnnnnnnnnnnnnnnnnnnnnnnnnnnnnnnnnnnnnnnnnnnnnnnnnnnnnnnnnnnnnnnnnnnnnnnnnnnnnnnnnnnnnnnnnnnnnnnnnnnnnnnnnnnnnnnnnnnnnnnnnnnnnnnnnnnnnnnnnnnnnnnnnnnnnnnnnnnnnnnnnnnnnnnnnnnnnnnnnnnnnnnnnnnnnnnnnnnnnnnnnnnnnnnnnnnnnnnnnnnnnnnnnnnnnnnnnnnnnnnnnnnnnnnnnnnnnnnnnnnnnnnnnnnnnnnnnnnnnnnnnnnnnnnnnnnnnnnnnnnnnnnnnnnnnnnnnnnnnnnnnnnnnnnnnnnnnnnnnnnnnnnnnnnnnnnnnnnnnnnnnnnnnnnnnnnnnnnnnnnnnnnnnnnnnnnnnnnnnnnnnnnnnnnnnnnnnnnnnnnnnnnnnnnnnnnnnnnnnnnnnnnnnnnnnnnnnnnnnnnnnnnnnnnnnnnnnnnnnnnnnnnnnnnnnnnnnnnnnnnnnnnnnnnnnnnnnnnnnnnnnnnnnnnnnnnnnnnnnnnnnnnnnnnnnnnnnnnnnnnnnnnnnnnnnnnnnnnnnnnnnnnnnnnnnnnnnnnnnnnnnnnnnnnnnnnnnnnnnnnnnnnnnnnnnnnnnnnnnnnnnnnnnnnnnnnnnnnnnnnnnnnnnnnnnnnnnnnnnnnnnnnnnnnnnnnnnnnnnnnnnnnnnnnnnnnnnnnnnnnnnnnnnnnnnnnnnnnnnnnnnnnnnnnnnnnnnnnnnnnnnnnnnnnnnnnnnnnnnnnnnnnnnnnnnnnnnnnnnnnnnnnnnnnnnnnnnnnnnnnnnnnnnnnnnnnnnnnnnnnnnnnnnnnnnnnnnnnnnnnnnnnnnnnnnnnnnnnnnnnnnnnnnnnnnnnnnnnnnnnnnnnnnnnnnnnnnnnnnnnnnnnnnnnnnnnnnnnnnnnnnnnnnnnnnnnnnnnnnnnnnnnnnnnnnnnnnnnnnnnnnnnnnnnnnnnnnnnnnnnnnnnnnnnnnnnnnnnnnnnnnnnnnnnnnnnnnnnnnnnnnnnnnnnnnnnnnnnnnnnnnnnnnnnnnnnnnnnnnnnnnnnnnnnnnnnnnnnnnnnnnnnnnnnnnnnnnnnnnnnnnnnnnnnnnnnnnnnnnnnnnnnnnnnnnnnnnnnnnnnnnnnnnnnnnnnnnnnnnnnnnnnnnnnnnnnnnnnnnnnnnnnnnnnnnnnnnnnnnnnnnnnnnnnnnnnnnnnnnnnnnnnnnnnnnnnnnnnnnnnnnnnnnnnnnnnnnnnnnnnnnnnnnnnnnnnnnnnnnnnnnnnnnnnnnnnnnnnnnnnnnnnnnnnnnnnnnnnnnnnnnnnnnnnnnnnnnnnnnnnnnnnnnnnnnnnnnnnnnnnnnnnnnnnnnnnnnnnnnnnnnnnnnnnnnnnnnnnnnnnnnnnnnnnnnnnnnnnnnnnnnnnnnnnnnnnnnnnnnnnnnnnnnnnnnnnnnnnnnnnnnnnnnnnnnnnnnnnnnnnnnnnnnnnnnnnnnnnnnnnnnnnnnnnnnnnnnnnnnnnnnnnnnnnnnnnnnnnnnnnnnnnnnnnnnnnnnnnnnnnnnnnnnnnnnnnnnnnnnnnnnnnnnnnnnnnnnnnnnnnnnnnnnnnnnnnnnnnnnnnnnnnnnnnnnnnnnnnnnnnnnnnnnnnnnnnnnnnnnnnnnnnnnnnnnnnnnnnnnnnnnnnnnnnnnnnnnnnnnnnnnnnnnnnnnnnnnnnnnnnnnnnnnnnnnnnnnnnnnnnnnnnnnnnnnnnnnnnnnnnnnnnnnnnnnnnnnnnnnnnnnnnnnnnnnnnnnnnnnnnnnnnnnnnnnnnnnnnnnnnnnnnnnnnnnnnnnnnnnnnnnnnnnnnnnnnnnnnnnnnnnnnnnnnnnnnnnnnnnnnnnnnnnnnnnnnnnnnnnnnnnnnnnnnnnnnnnnnnnnnnnnnnnnnnnnnnnnnnnnnnnnnnnnnnnnnnnnnnnnnnnnnnnnnnnnnnnnnnnnnnnnnnnnnnnnnnnnnnnnnnnnnnnnnnnnnnnnnnnnnnnnnnnnnnnnnnnnnnnnnnnnnnnnnnnnnnnnnnnnnnnnnnnnnnnnnnnnnnnnnnnnnnnnnnnnnnnnnnnnnnnnnnnnnnnnnnnnnnnnnnnnnnnnnnnnnnnnnnnnnnnnnnnnnnnnnnnnnnnnnnnnnnnnnnnnnnnnnnnnnnnnnnnnnnnnnnnnnnnnnnnnnnnnnnnnnnnnnnnnnnnnnnnnnnnnnnnnnnnnnnnnnnnnnnnnnnnnnnnnnnnnnnnnnnnnnnnnnnnnnnnnnnnnnnnnnnnnnnnnnnnnnnnnnnnnnnnnnnnnnnnnnnnnnnnnnnnnnnnnnnnnnnnnnnnnnnnnnnnnnnnnnnnnnnnnnnnnnnnnnnnnnnnnnnnnnnnnnnnnnnnnnnnnnnnnnnnnnnnnnnnnnnnnnnnnnnnnnnnnnnnnnnnnnnnnnnnnnnnnnnnnnnnnnnnnnnnnnnnnnnnnnnnnnnnnnnnnnnnnnnnnnnnnnnnnnnnnnnnnnnnnnnnnnnnnnnnnnnnnnnnnnnnnnnnnnnnnnnnnnnnnnnnnnnnnnnnnnnnnnnnnnnnnnnnnnnnnnnnnnnnnnnnnnnnnnnnnnnnnnnnnnnnnnnnnnnnnnnnnnnnnnnnnnnnnnnnnnnnnnnnnnnnnnnnnnnnnnnnnnnnnnnnnnnnnnnnnnnnnnnnnnnnnnnnnnnnnnnnnnnnnnnnnnnnnnnnnnnnnnnnnnnnnnnnnnnnnnnnnnnnnnnnnnnnnnnnnnnnnnnnnnnnnnnnnnnnnnnnnnnnnnnnnnnnnnnnnnnnnnnnnnnnnnnnnnnnnnnnnnnnnnnnnnnnnnnnnnnnnnnnnnnnnnnnnnnnnnnnnnnnnnnnnnnnnnnnnnnnnnnnnnnnnnnnnnnnnnnnnnnnnnnnnnnnnnnnnnnnnnnnnnnnnnnnnnnnnnnnnnnnnnnnnnnnnnnnnnnnnnnnnnnnnnnnnnnnnnnnnnnnnnnnnnnnnnnnnnnnnnnnnnnnnnnnnnnnnnnnnnnnnnnnnnnnnnnnnnnnnnnnnnnnnnnnnnnnnnnnnnnnnnnnnnnnnnnnnnnnnnnnnnnnnnnnnnnnnnnnnnnnnnnnnnnnnnnnnnnnnnnnnnnnnnnnnnnnnnnnnnnnnnnnnnnnnnnnnnnnnnnnnnnnnnnnnnnnnnnnnnnnnnnnnnnnnnnnnnnnnnnnnnnnnnnnnnnnnnnnnnnnnnnnnnnnnnnnnnnnnnnnnnnnnnnnnnnnnnnnnnnnnnnnnnnnnnnnnnnnnnnnnnnnnnnnnnnnnnnnnnnnnnnnnnnnnnnnnnnnnnnnnnnnnnnnnnnnnnnnnnnnnnnnnnnnnnnnnnnnnnnnnnnnnnnnnnnnnnnnnnnnnnnnnnnnnnnnnnnnnnnnnnnnnnnnnnnnnnnnnnnnnnnnnnnnnnnnnnnnnnnnnnnnnnnnnnnnnnnnnnnnnnnnnnnnnnnnnnnnnnnnnnnnnnnnnnnnnnnnnnnnnnnnnnnnnnnnnnnnnnnnnnnnnnnnnnnnnnnnnnnnnnnnnnnnnnnnnnnnnnnnnnnnnnnnnnnnnnnnnnnnnnnnnnnnnnnnnnnnnnnnnnnnnnnnnnnnnnnnnnnnnnnnnnnnnnnnnnnnnnnnnnnnnnnnnnnnnnnnnnnnnnnnnnnnnnnnnnnnnnnnnnnnnnnnnnnnnnnnnnnnnnnnnnnnnnnnnnnnnnnnnnnnnnnnnnnnnnnnnnnnnnnnnnnnnnnnnnnnnnnnnnnnnnnnnnnnnnnnnnnnnnnnnnnnnnnnnnnnnnnnnnnnnnnnnnnnnnnnnnnnnnnnnnnnnnnnnnnnnnnnnnnnnnnnnnnnnnnnnnnnnnnnnnnnnnnnnnnnnnnnnnnnnnnnnnnnnnnnnnnnnnnnnnnnnnnnnnnnnnnnnnnnnnnnnnnnnnnnnnnnnnnnnnnnnnnnnnnnnnnnnnnnnnnnnnnnnnnnnnnnnnnnnnnnnnnnnnnnnnnnnnnnnnnnnnnnnnnnnnnnnnnnnnnnnnnnnnnnnnnnnnnnnnnnnnnnnnnnnnnnnnnnnnnnnnnnnnnnnnnnnnnnnnnnnnnnnnnnnnnnnnnnnnnnnnnnnnnnnnnnnnnnnnnnnnnnnnnnnnnnnnnnnnnnnnnnnnnnnnnnnnnnnnnnnnnnnnnnnnnnnnnnnnnnnnnnnnnnnnnnnnnnnnnnnnnnnnnnnnnnnnnnnnnnnnnnnnnnnnnnnnnnnnnnnnnnnnnnnnnnnnnnnnnnnnnnnnnnnnnnnnnnnnnnnnnnnnnnnnnnnnnnnnnnnnnnnnnnnnnnnnnnnnnnnnnnnnnnnnnnnnnnnnnnnnnnnnnnnnnnnnnnnnnnnnnnnnnnnnnnnnnnnnnnnnnnnnnnnnnnnnnnnnnnnnnnnnnnnnnnnnnnnnnnnnnnnnnnnnnnnnnnnnnnnnnnnnnnnnnnnnnnnnnnnnnnnnnnnnnnnnnnnnnnnnnnnnnnnnnnnnnnnnnnnnnnnnnnnnnnnnnnnnnnnnnnnnnnnnnnnnnnnnnnnnnnnnnnnnnnnnnnnnnnnnnnnnnnnnnnnnnnnnnnnnnnnnnnnnnnnnnnnnnnnnnnnnnnnnnnnnnnnnnnnnnnnnnnnnnnnnnnnnnnnnnnnnnnnnnnnnnnnnnnnnnnnnnnnnnnnnnnnnnnnnnnnnnnnnnnnnnnnnnnnnnnnnnnnnnnnnnnnnnnnnnnnnnnnnnnnnnnnnnnnnnnnnnnnnnnnnnnnnnnnnnnnnnnnnnnnnnnnnnnnnnnnnnnnnnnnnnnnnnnnnnnnnnnnnnnnnnnnnnnnnnnnnnnnnnnnnnnnnnnnnnnnnnnnnnnnnnnnnnnnnnnnnnnnnnnnnnnnnnnnnnnnnnnnnnnnnnnnnnnnnnnnnnnnnnnnnnnnnnnnnnnnnnnnnnnnnnnnnnnnnnnnnnnnnnnnnnnnnnnnnnnnnnnnnnnnnnnnnnnnnnnnnnnnnnnnnnnnnnnnnnnnnnnnnnnnnnnnnnnnnnnnnnnnnnnnnnnnnnnnnnnnnnnnnnnnnnnnnnnnnnnnnnnnnnnnnnnnnnnnnnnnnnnnnnnnnnnnnnnnnnnnnnnnnnnnnnnnnnnnnnnnnnnnnnnnnnnnnnnnnnnnnnnnnnnnnnnnnnnnnnnnnnnnnnnnnnnnnnnnnnnnnnnnnnnnnnnnnnnnnnnnnnnnnnnnnnnnnnnnnnnnnnnnnnnnnnnnnnnnnnnnnnnnnnnnnnnnnnnnnnnnnnnnnnnnnnnnnnnnnnnnnnnnnnnnnnnnnnnnnnnnnnnnnnnnnnnnnnnnnnnnnnnnnnnnnnnnnnnnnnnnnnnnnnnnnnnnnnnnnnnnnnnnnnnnnnnnnnnnnnnnnnnnnnnnnnnnnnnnnnnnnnnnnnnnnnnnnnnnnnnnnnnnnnnnnnnnnnnnnnnnnnnnnnnnnnnnnnnnnnnnnnnnnnnnnnnnnnnnnnnnnnnnnnnnnnnnnnnnnnnnnnnnnnnnnnnnnnnnnnnnnnnnnnnnnnnnnnnnnnnnnnnnnnnnnnnnnnnnnnnnnnnnnnnnnnnnnnnnnnnnnnnnnnnnnnnnnnnnnnnnnnnnnnnnnnnnnnnnnnnnnnnnnnnnnnnnnnnnnnnnnnnnnnnnnnnnnnnnnnnnnnnnnnnnnnnnnnnnnnnnnnnnnnnnnnnnnnnnnnnnnnnnnnnnnnnnnnnnnnnnnnnnnnnnnnnnnnnnnnnnnnnnnnnnnnnnnnnnnnnnnnnnnnnnnnnnnnnnnnnnnnnnnnnnnnnnnnnnnnnnnnnnnnnnnnnnnnnnnnnnnnnnnnnnnnnnnnnnnnnnnnnnnnnnnnnnnnnnnnnnnnnnnnnnnnnnnnnnnnnnnnnnnnnnnnnnnnnnnnnnnnnnnnnnnnnnnnnnnnnnnnnnnnnnnnnnnnnnnnnnnnnnnnnnnnnnnnnnnnnnnnnnnnnnnnnnnnnnnnnnnnnnnnnnnnnnnnnnnnnnnnnnnnnnnnnnnnnnnnnnnnnnnnnnnnnnnnnnnnnnnnnnnnnnnnnnnnnnnnnnnnnnnnnnnnnnnnnnnnnnnnnnnnnnnnnnnnnnnnnnnnnnnnnnnnnnnnnnnnnnnnnnnnnnnnnnnnnnnnnnnnnnnnnnnnnnnnnnnnnnnnnnnnnnnnnnnnnnnnnnnnnnnnnnnnnnnnnnnnnnnnnnnnnnnnnnnnnnnnnnnnnnnnnnnnnnnnnnnnnnnnnnnnnnnnnnnnnnnnnnnnnnnnnnnnnnnnnnnnnnnnnnnnnnnnnnnnnnnnnnnnnnnnnnnnnnnnnnnnnnnnnnnnnnnnnnnnnnnnnnnnnnnnnnnnnnnnnnnnnnnnnnnnnnnnnnnnnnnnnnnnnnnnnnnnnnnnnnnnnnnnnnnnnnnnnnnnnnnnnnnnnnnnnnnnnnnnnnnnnnnnnnnnnnnnnnnnnnnnnnnnnnnnnnnnnnnnnnnnnnnnnnnnnnnnnnnnnnnnnnnnnnnnnnnnnnnnnnnnnnnnnnnnnnnnnnnnnnnnnnnnnnnnnnnnnnnnnnnnnnnnnnnnnnnnnnnnnnnnnnnnnnnnnnnnnnnnnnnnnnnnnnnnnnnnnnnnnnnnnnnnnnnnnnnnnnnnnnnnnnnnnnnnnnnnnnnnnnnnnnnnnnnnnnnnnnnnnnnnnnnnnnnnnnnnnnnnnnnnnnnnnnnnnnnnnnnnnnnnnnnnnnnnnnnnnnnnnnnnnnnnnnnnnnnnnnnnnnnnnnnnnnnnnnnnnnnnnnnnnnnnnnnnnnnnnnnnnnnnnnnnnnnnnnnnnnnnnnnnnnnnnnnnnnnnnnnnnnnnnnnnnnnnnnnnnnnnnnnnnnnnnnnnnnnnnnnnnnnnnnnnnnnnnnnnnnnnnnnnnnnnnnnnnnnnnnnnnnnnnnnnnnnnnnnnnnnnnnnnnnnnnnnnnnnnnnnnnnnnnnnnnnnnnnnnnnnnnnnnnnnnnnnnnnnnnnnnnnnnnnnnnnnnnnnnnnnnnnnnnnnnnnnnnnnnnnnnnnnnnnnnnnnnnnnnnnnnnnnnnnnnnnnnnnnnnnnnnnnnnnnnnnnnnnnnnnnnnnnnnnnnnnnnnnnnnnnnnnnnnnnnnnnnnnnnnnnnnnnnnnnnnnnnnnnnnnnnnnnnnnnnnnnnnnnnnnnnnnnnnnnnnnnnnnnnnnnnnnnnnnnnnnnnnnnnnnnnnnnnnnnnnnnnnnnnnnnnnnnnnnnnnnnnnnnnnnnnnnnnnnnnnnnnnnnnnnnnnnnnnnnnnnnnnnnnnnnnnnnnnnnnnnnnnnnnnnnnnnnnnnnnnnnnnnnnnnnnnnnnnnnnnnnnnnnnnnnnnnnnnnnnnnnnnnnnnnnnnnnnnnnnnnnnnnnnnnnnnnnnnnnnnnnnnnnnnnnnnnnnnnnnnnnnnnnnnnnnnnnnnnnnnnnnnnnnnnnnnnnnnnnnnnnnnnnnnnnnnnnnnnnnnnnnnnnnnnnnnnnnnnnnnnnnnnnnnnnnnnnnnnnnnnnnnnnnnnnnnnnnnnnnnnnnnnnnnnnnnnnnnnnnnnnnnnnnnnnnnnnnnnnnnnnnnnnnnnnnnnnnnnnnnnnnnnnnnnnnnnnnnnnnnnnnnnnnnnnnnnnnnnnnnnnnnnnnnnnnnnnnnnnnnnnnnnnnnnnnnnnnnnnnnnnnnnnnnnnnnnnnnnnnnnnnnnnnnnnnnnnnnnnnnnnnnnnnnnnnnnnnnnnnnnnnnnnnnnnnnnnnnnnnnnnnnnnnnnnnnnnnnnnnnnnnnnnnnnnnnnnnnnnnnnnnnnnnnnnnnnnnnnnnnnnnnnnnnnnnnnnnnnnnnnnnnnnnnnnnnnnnnnnnnnnnnnnnnnnnnnnnnnnnnnnnnnnnnnnnnnnnnnnnnnnnnnnnnnnnnnnnnnnnnnnnnnnnnnnnnnnnnnnnnnnnnnnnnnnnnnnnnnnnnnnnnnnnnnnnnnnnnnnnnnnnnnnnnnnnnnnnnnnnnnnnnnnnnnnnnnnnnnnnnnnnnnnnnnnnnnnnnnnnnnnnnnnnnnnnnnnnnnnnnnnnnnnnnnnnnnnnnnnnnnnnnnnnnnnnnnnnnnnnnnnnnnnnnnnnnnnnnnnnnnnnnnnnnnnnnnnnnnnnnnnnnnnnnnnnnnnnnnnnnnnnnnnnnnnnnnnnnnnnnnnnnnnnnnnnnnnnnnnnnnnnnnnnnnnnnnnnnnnnnnnnnnnnnnnnnnnnnnnnnnnnnnnnnnnnnnnnnnnnnnnnnnnnnnnnnnnnnnnnnnnnnnnnnnnnnnnnnnnnnnnnnnnnnnnnnnnnnnnnnnnnnnnnnnnnnnnnnnnnnnnnnnnnnnnnnnnnnnnnnnnnnnnnnnnnnnnnnnnnnnnnnnnnnnnnnnnnnnnnnnnnnnnnnnnnnnnnnnnnnnnnnnnnnnnnnnnnnnnnnnnnnnnnnnnnnnnnnnnnnnnnnnnnnnnnnnnnnnnnnnnnnnnnnnnnnnnnnnnnnnnnnnnnnnnnnnnnnnnnnnnnnnnnnnnnnnnnnnnnnnnnnnnnnnnnnnnnnnnnnnnnnnnnnnnnnnnnnnnnnnnnnnnnnnnnnnnnnnnnnnnnnnnnnnnnnnnnnnnnnnnnnnnnnnnnnnnnnnnnnnnnnnnnnnnnnnnnnnnnnnnnnnnnnnnnnnnnnnnnnnnnnnnnnnnnnnnnnnnnnnnnnnnnnnnnnnnnnnnnnnnnnnnnnnnnnnnnnnnnnnnnnnnnnnnnnnnnnnnnnnnnnnnnnnnnnnnnnnnnnnnnnnnnnnnnnnnnnnnnnnnnnnnnnnnnnnnnnnnnnnnnnnnnnnnnnnnnnnnnnnnnnnnnnnnnnnnnnnnnnnnnnnnnnnnnnnnnnnnnnnnnnnnnnnnnnnnnnnnnnnnnnnnnnnnnnnnnnnnnnnnnnnnnnnnnnnnnnnnnnnnnnnnnnnnnnnnnnnnnnnnnnnnnnnnnnnnnnnnnnnnnnnnnnnnnnnnnnnnnnnnnnnnnnnnnnnnnnnnnnnnnnnnnnnnnnnnnnnnnnnnnnnnnnnnnnnnnnnnnnnnnnnnnnnnnnnnnnnnnnnnnnnnnnnnnnnnnnnnnnnnnnnnnnnnnnnnnnnnnnnnnnnnnnnnnnnnnnnnnnnnnnnnnnnnnnnnnnnnnnnnnnnnnnnnnnnnnnnnnnnnnnnnnnnnnnnnnnnnnnnnnnnnnnnnnnnnnnnnnnnnnnnnnnnnnnnnnnnnnnnnnnnnnnnnnnnnnnnnnnnnnnnnnnnnnnnnnnnnnnnnnnnnnnnnnnnnnnnnnnnnnnnnnnnnnnnnnnnnnnnnnnnnnnnnnnnnnnnnnnnnnnnnnnnnnnnnnnnnnnnnnnnnnnnnnnnnnnnnnnnnnnnnnnnnnnnnnnnnnnnnnnnnnnnnnnnnnnnnnnnnnnnnnnnnnnnnnnnnnnnnnnnnnnnnnnnnnnnnnnnnnnnnnnnnnnnnnnnnnnnnnnnnnnnnnnnnnnnnnnnnnnnnnnnnnnnnnnnnnnnnnnnnnnnnnnnnnnnnnnnnnnnnnnnnnnnnnnnnnnnnnnnnnnnnnnnnnnnnnnnnnnnnnnnnnnnnnnnnnnnnnnnnnnnnnnnnnnnnnnnnnnnnnnnnnnnnnnnnnnnnnnnnnnnnnnnnnnnnnnnnnnnnnnnnnnnnnnnnnnnnnnnnnnnnnnnnnnnnnnnnnnnnnnnnnnnnnnnnnnnnnnnnnnnnnnnnnnnnnnnnnnnnnnnnnnnnnnnnnnnnnnnnnnnnnnnnnnnnnnnnnnnnnnnnnnnnnnnnnnnnnnnnnnnnnnnnnnnnnnnnnnnnnnnnnnnnnnnnnnnnnnnnnnnnnnnnnnnnnnnnnnnnnnnnnnnnnnnnnnnnnnnnnnnnnnnnnnnnnnnnnnnnnnnnnnnnnnnnnnnnnnnnnnnnnnnnnnnnnnnnnnnnnnnnnnnnnnnnnnnnnnnnnnnnnnnnnnnnnnnnnnnnnnnnnnnnnnnnnnnnnnnnnnnnnnnnnnnnnnnnnnnnnnnnnnnnnnnnnnnnnnnnnnnnnnnnnnnnnnnnnnnnnnnnnnnnnnnnnnnnnnnnnnnnnnnnnnnnnnnnnnnnnnnnnnnnnnnnnnnnnnnnnnnnnnnnnnnnnnnnnnnnnnnnnnnnnnnnnnnnnnnnnnnnnnnnnnnnnnnnnnnnnnnnnnnnnnnnnnnnnnnnnnnnnnnnnnnnnnnnnnnnnnnnnnnnnnnnnnnnnnnnnnnnnnnnnnnnnnnnnnnnnnnnnnnnnnnnnnnnnnnnnnnnnnnnnnnnnnnnnnnnnnnnnnnnnnnnnnnnnnnnnnnnnnnnnnnnnnnnnnnnnnnnnnnnnnnnnnnnnnnnnnnnnnnnnnnnnnnnnnnnnnnnnnnnnnnnnnnnnnnnnnnnnnnnnnnnnnnnnnnnnnnnnnnnnnnnnnnnnnnnnnnnnnnnnnnnnnnnnnnnnnnnnnnnnnnnnnnnnnnnnnnnnnnnnnnnnnnnnnnnnnnnnnnnnnnnnnnnnnnnnnnnnnnnnnnnnnnnnnnnnnnnnnnnnnnnnnnnnnnnnnnnnnnnnnnnnnnnnnnnnnnnnnnnnnnnnnnnnnnnnnnnnnnnnnnnnnnnnnnnnnnnnnnnnnnnnnnnnnnnnnnnnnnnnnnnnnnnnnnnnnnnnnnnnnnnnnnnnnnnnnnnnnnnnnnnnnnnnnnnnnnnnnnnnnnnnnnnnnnnnnnnnnnnnnnnnnnnnnnnnnnnnnnnnnnnnnnnnnnnnnnnnnnnnnnnnnnnnnnnnnnnnnnnnnnnnnnnnnnnnnnnnnnnnnnnnnnnnnnnnnnnnnnnnnnnnnnnnnnnnnnnnnnnnnnnnnnnnnnnnnnnnnnnnnnnnnnnnnnnnnnnnnnnnnnnnnnnnnnnnnnnnnnnnnnnnnnnnnnnnnnnnnnnnnnnnnnnnnnnnnnnnnnnnnnnnnnnnnnnnnnnnnnnnnnnnnnnnnnnnnnnnnnnnnnnnnnnnnnnnnnnnnnnnnnnnnnnnnnnnnnnnnnnnnnnnnnnnnnnnnnnnnnnnnnnnnnnnnnnnnnnnnnnnnnnnnnnnnnnnnnnnnnnnnnnnnnnnnnnnnnnnnnnnnnnnnnnnnnnnnnnnnnnnnnnnnnnnnnnnnnnnnnnnnnnnnnnnnnnnnnnnnnnnnnnnnnnnnnnnnnnnnnnnnnnnnnnnnnnnnnnnnnnnnnnnnnnnnnnnnnnnnnnnnnnnnnnnnnnnnnnnnnnnnnnnnnnnnnnnnnnnnnnnnnnnnnnnnnnnnnnnnnnnnnnnnnnnnnnnnnnnnnnnnnnnnnnnnnnnnnnnnnnnnnnnnnnnnnnnnnnnnnnnnnnnnnnnnnnnnnnnnnnnnnnnnnnnnnnnnnnnnnnnnnnnnnnnnnnnnnnnnnnnnnnnnnnnnnnnnnnnnnnnnnnnnnnnnnnnnnnnnnnnnnnnnnnnnnnnnnnnnnnnnnnnnnnnnnnnnnnnnnnnnnnnnnnnnnnnnnnnnnnnnnnnnnnnnnnnnnnnnnnnnnnnnnnnnnnnnnnnnnnnnnnnnnnnnnnnnnnnnnnnnnnnnnnnnnnnnnnnnnnnnnnnnnnnnnnnnnnnnnnnnnnnnnnnnnnnnnnnnnnnnnnnnnnnnnnnnnnnnnnnnnnnnnnnnnnnnnnnnnnnnnnnnnnnnnnnnnnnnnnnnnnnnnnnnnnnnnnnnnnnnnnnnnnnnnnnnnnnnnnnnnnnnnnnnnnnnnnnnnnnnnnnnnnnnnnnnnnnnnnnnnnnnnnnnnnnnnnnnnnnnnnnnnnnnnnnnnnnnnnnnnnnnnnnnnnnnnnnnnnnnnnnnnnnnnnnnnnnnnnnnnnnnnnnnnnnnnnnnnnnnnnnnnnnnnnnnnnnnnnnnnnnnnnnnnnnnnnnnnnnnnnnnnnnnnnnnnnnnnnnnnnnnnnnnnnnnnnnnnnnnnnnnnnnnnnnnnnnnnnnnnnnnnnnnnnnnnnnnnnnnnnnnnnnnnnnnnnnnnnnnnnnnnnnnnnnnnnnnnnnnnnnnnnnnnnnnnnnnnnnnnnnnnnnnnnnnnnnnnnnnnnnnnnnnnnnnnnnnnnnnnnnnnnnnnnnnnnnnnnnnnnnnnnnnnnnnnnnnnnnnnnnnnnnnnnnnnnnnnnnnnnnnnnnnnnnnnnnnnnnnnnnnnnnnnnnnnnnnnnnnnnnnnnnnnnnnnnnnnnnnnnnnnnnnnnnnnnnnnnnnnnnnnnnnnnnnnnnnnnnnnnnnnnnnnnnnnnnnnnnnnnnnnnnnnnnnnnnnnnnnnnnnnnnnnnnnnnnnnnnnnnnnnnnnnnnnnnnnnnnnnnnnnnnnnnnnnnnnnnnnnnnnnnnnnnnnnnnnnnnnnnnnnnnnnnnnnnnnnnnnnnnnnnnnnnnnnnnnnnnnnnnnnnnnnnnnnnnnnnnnnnnnnnnnnnnnnnnnnnnnnnnnnnnnnnnnnnnnnnnnnnnnnnnnnnnnnnnnnnnnnnnnnnnnnnnnnnnnnnnnnnnnnnnnnnnnnnnnnnnnnnnnnnnnnnnnnnnnnnnnnnnnnnnnnnnnnnnnnnnnnnnnnnnnnnnnnnnnnnnnnnnnnnnnnnnnnnnnnnnnnnnnnnnnnnnnnnnnnnnnnnnnnnnnnnnnnnnnnnnnnnnnnnnnnnnnnnnnnnnnnnnnnnnnnnnnnnnnnnnnnnnnnnnnnnnnnnnnnnnnnnnnnnnnnnnnnnnnnnnnnnnnnnnnnnnnnnnnnnnnnnnnnnnnnnnnnnnnnnnnnnnnnnnnnnnnnnnnnnnnnnnnnnnnnnnnnnnnnnnnnnnnnnnnnnnnnnnnnnnnnnnnnnnnnnnnnnnnnnnnnnnnnnnnnnnnnnnnnnnnnnnnnnnnnnnnnnnnnnnnnnnnnnnnnnnnnnnnnnnnnnnnnnnnnnnnnnnnnnnnnnnnnnnnnnnnnnnnnnnnnnnnnnnnnnnnnnnnnnnnnnnnnnnnnnnnnnnnnnnnnnnnnnnnnnnnnnnnnnnnnnnnnnnnnnnnnnnnnnnnnnnnnnnnnnnnnnnnnnnnnnnnnnnnnnnnnnnnnnnnnnnnnnnnnnnnnnnnnnnnnnnnnnnnnnnnnnnnnnnnnnnnnnnnnnnnnnnnnnnnnnnnnnnnnnnnnnnnnnnnnnnnnnnnnnnnnnnnnnnnnnnnnnnnnnnnnnnnnnnnnnnnnnnnnnnnnnnnnnnnnnnnnnnnnnnnnnnnnnnnnnnnnnnnnnnnnnnnnnnnnnnnnnnnnnnnnnnnnnnnnnnnnnnnnnnnnnnnnnnnnnnnnnnnnnnnnnnnnnnnnnnnnnnnnnnnnnnnnnnnnnnnnnnnnnnnnnnnnnnnnnnnnnnnnnnnnnnnnnnnnnnnnnnnnnnnnnnnnnnnnnnnnnnnnnnnnnnnnnnnnnnnnnnnnnnnnnnnnnnnnnnnnnnnnnnnnnnnnnnnnnnnnnnnnnnnnnnnnnnnnnnnnnnnnnnnnnnnnnnnnnnnnnnnnnnnnnnnnnnnnnnnnnnnnnnnnnnnnnnnnnnnnnnnnnnnnnnnnnnnnnnnnnnnnnnnnnnnnnnnnnnnnnnnnnnnnnnnnnnnnnnnnnnnnnnnnnnnnnnnnnnnnnnnnnnnnnnnnnnnnnnnnnnnnnnnnnnnnnnnnnnnnnnnnnnnnnnnnnnnnnnnnnnnnnnnnnnnnnnnnnnnnnnnnnnnnnnnnnnnnnnnnnnnnnnnnnnnnnnnnnnnnnnnnnnnnnnnnnnnnnnnnnnnnnnnnnnnnnnnnnnnnnnnnnnnnnnnnnnnnnnnnnnnnnnnnnnnnnnnnnnnnnnnnnnnnnnnnnnnnnnnnnnnnnnnnnnnnnnnnnnnnnnnnnnnnnnnnnnnnnnnnnnnnnnnnnnnnnnnnnnnnnnnnnnnnnnnnnnnnnnnnnnnnnnnnnnnnnnnnnnnnnnnnnnnnnnnnnnnnnnnnnnnnnnnnnnnnnnnnnnnnnnnnnnnnnnnnnnnnnnnnnnnnnnnnnnnnnnnnnnnnnnnnnnnnnnnnnnnnnnnnnnnnnnnnnnnnnnnnnnnnnnnnnnnnnnnnnnnnnnnnnnnnnnnnnnnnnnnnnnnnnnnnnnnnnnnnnnnnnnnnnnnnnnnnnnnnnnnnnnnnnnnnnnnnnnnnnnnnnnnnnnnnnnnnnnnnnnnnnnnnnnnnnnnnnnnnnnnnnnnnnnnnnnnnnnnnnnnnnnnnnnnnnnnnnnnnnnnnnnnnnnnnnnnnnnnnnnnnnnnnnnnnnnnnnnnnnnnnnnnnnnnnnnnnnnnnnnnnnnnnnnnnnnnnnnnnnnnnnnnnnnnnnnnnnnnnnnnnnnnnnnnnnnnnnnnnnnnnnnnnnnnnnnnnnnnnnnnnnnnnnnnnnnnnnnnnnnnnnnnnnnnnnnnnnnnnnnnnnnnnnnnnnnnnnnnnnnnnnnnnnnnnnnnnnnnnnnnnnnnnnnnnnnnnnnnnnnnnnnnnnnnnnnnnnnnnnnnnnnnnnnnnnnnnnnnnnnnnnnnnnnnnnnnnnnnnnnnnnnnnnnnnnnnnnnnnnnnnnnnnnnnnnnnnnnnnnnnnnnnnnnnnnnnnnnnnnnnnnnnnnnnnnnnnnnnnnnnnnnnnnnnnnnnnnnnnnnnnnnnnnnnnnnnnnnnnnnnnnnnnnnnnnnnnnnnnnnnnnnnnnnnnnnnnnnnnnnnnnnnnnnnnnnnnnnnnnnnnnnnnnnnnnnnnnnnnnnnnnnnnnnnnnnnnnnnnnnnnnnnnnnnnnnnnnnnnnnnnnnnnnnnnnnnnnnnnnnnnnnnnnnnnnnnnnnnnnnnnnnnnnnnnnnnnnnnnnnnnnnnnnnnnnnnnnnnnnnnnnnnnnnnnnnnnnnnnnnnnnnnnnnnnnnnnnnnnnnnnnnnnnnnnnnnnnnnnnnnnnnnnnnnnnnnnnnnnnnnnnnnnnnnnnnnnnnnnnnnnnnnnnnnnnnnnnnnnnnnnnnnnnnnnnnnnnnnnnnnnnnnnnnnnnnnnnnnnnnnnnnnnnnnnnnnnnnnnnnnnnnnnnnnnnnnnnnnnnnnnnnnnnnnnnnnnnnnnnnnnnnnnnnnnnnnnnnnnnnnnnnnnnnnnnnnnnnnnnnnnnnnnnnnnnnnnnnnnnnnnnnnnnnnnnnnnnnnnnnnnnnnnnnnnnnnnnnnnnnnnnnnnnnnnnnnnnnnnnnnnnnnnnnnnnnnnnnnnnnnnnnnnnnnnnnnnnnnnnnnnnnnnnnnnnnnnnnnnnnnnnnnnnnnnnnnnnnnnnnnnnnnnnnnnnnnnnnnnnnnnnnnnnnnnnnnnnnnnnnnnnnnnnnnnnnnnnnnnnnnnnnnnnnnnnnnnnnnnnnnnnnnnnnnnnnnnnnnnnnnnnnnnnnnnnnnnnnnnnnnnnnnnnnnnnnnnnnnnnnnnnnnnnnnnnnnnnnnnnnnnnnnnnnnnnnnnnnnnnnnnnnnnnnnnnnnnnnnnnnnnnnnnnnnnnnnnnnnnnnnnnnnnnnnnnnnnnnnnnnnnnnnnnnnnnnnnnnnnnnnnnnnnnnnnnnnnnnnnnnnnnnnnnnnnnnnnnnnnnnnnnnnnnnnnnnnnnnnnnnnnnnnnnnnnnnnnnnnnnnnnnnnnnnnnnnnnnnnnnnnnnnnnnnnnnnnnnnnnnnnnnnnnnnnnnnnnnnnnnnnnnnnnnnnnnnnnnnnnnnnnnnnnnnnnnnnnnnnnnnnnnnnnnnnnnnnnnnnnnnnnnnnnnnnnnnnnnnnnnnnnnnnnnnnnnnnnnnnnnnnnnnnnnnnnnnnnnnnnnnnnnnnnnnnnnnnnnnnnnnnnnnnnnnnnnnnnnnnnnnnnnnnnnnnnnnnnnnnnnnnnnnnnnnnnnnnnnnnnnnnnnnnnnnnnnnnnnnnnnnnnnnnnnnnnnnnnnnnnnnnnnnnnnnnnnnnnnnnnnnnnnnnnnnnnnnnnnnnnnnnnnnnnnnnnnnnnnnnnnnnnnnnnnnnnnnnnnnnnnnnnnnnnnnnnnnnnnnnnnnnnnnnnnnnnnnnnnnnnnnnnnnnnnnnnnnnnnnnnnnnnnnnnnnnnnnnnnnnnnnnnnnnnnnnnnnnnnnnnnnnnnnnnnnnnnnnnnnnnnnnnnnnnnnnnnnnnnnnnnnnnnnnnnnnnnnnnnnnnnnnnnnnnnnnnnnnnnnnnnnnnnnnnnnnnnnnnnnnnnnnnnnnnnnnnnnnnnnnnnnnnnnnnnnnnnnnnnnnnnnnnnnnnnnnnnnnnnnnnnnnnnnnnnnnnnnnnnnnnnnnnnnnnnnnnnnnnnnnnnnnnnnnnnnnnnnnnnnnnnnnnnnnnnnnnnnnnnnnnnnnnnnnnnnnnnnnnnnnnnnnnnnnnnnnnnnnnnnnnnnnnnnnnnnnnnnnnnnnnnnnnnnnnnnnnnnnnnnnnnnnnnnnnnnnnnnnnnnnnnnnnnnnnnnnnnnnnnnnnnnnnnnnnnnnnnnnnnnnnnnnnnnnnnnnnnnnnnnnnnnnnnnnnnnnnnnnnnnnnnnnnnnnnnnnnnnnnnnnnnnnnnnnnnnnnnnnnnnnnnnnnnnnnnnnnnnnnnnnnnnnnnnnnnnnnnnnnnnnnnnnnnnnnnnnnnnnnnnnnnnnnnnnnnnnnnnnnnnnnnnnnnnnnnnnnnnnnnnnnnnnnnnnnnnnnnnnnnnnnnnnnnnnnnnnnnnnnnnnnnnnnnnnnnnnnnnnnnnnnnnnnnnnnnnnnnnnnnnnnnnnnnnnnnnnnnnnnnnnnnnnnnnnnnnnnnnnnnnnnnnnnnnnnnnnnnnnnnnnnnnnnnnnnnnnnnnnnnnnnnnnnnnnnnnnnnnnnnnnnnnnnnnnnnnnnnnnnnnnnnnnnnnnnnnnnnnnnnnnnnnnnnnnnnnnnnnnnnnnnnnnnnnnnnnnnnnnnnnnnnnnnnnnnnnnnnnnnnnnnnnnnnnnnnnnnnnnnnnnnnnnnnnnnnnnnnnnnnnnnnnnnnnnnnnnnnnnnnnnnnnnnnnnnnnnnnnnnnnnnnnnnnnnnnnnnnnnnnnnnnnnnnnnnnnnnnnnnnnnnnnnnnnnnnnnnnnnnnnnnnnnnnnnnnnnnnnnnnnnnnnnnnnnnnnnnnnnnnnnnnnnnnnnnnnnnnnnnnnnnnnnnnnnnnnnnnnnnnnnnnnnnnnnnnnnnnnnnnnnnnnnnnnnnnnnnnnnnnnnnnnnnnnnnnnnnnnnnnnnnnnnnnnnnnnnnnnnnnnnnnnnnnnnnnnnnnnnnnnnnnnnnnnnnnnnnnnnnnnnnnnnnnnnnnnnnnnnnnnnnnnnnnnnnnnnnnnnnnnnnnnnnnnnnnnnnnnnnnnnnnnnnnnnnnnnnnnnnnnnnnnnnnnnnnnnnnnnnnnnnnnnnnnnnnnnnnnnnnnnnnnnnnnnnnnnnnnnnnnnnnnnnnnnnnnnnnnnnnnnnnnnnnnnnnnnnnnnnnnnnnnnnnnnnnnnnnnnnnnnnnnnnnnnnnnnnnnnnnnnnnnnnnnnnnnnnnnnnnnnnnnnnnnnnnnnnnnnnnnnnnnnnnnnnnnnnnnnnnnnnnnnnnnnnnnnnnnnnnnnnnnnnnnnnnnnnnnnnnnnnnnnnnnnnnnnnnnnnnnnnnnnnnnnnnnnnnnnnnnnnnnnnnnnnnnnnnnnnnnnnnnnnnnnnnnnnnnnnnnnnnnnnnnnnnnnnnnnnnnnnnnnnnnnnnnnnnnnnnnnnnnnnnnnnnnnnnnnnnnnnnnnnnnnnnnnnnnnnnnnnnnnnnnnnnnnnnnnnnnnnnnnnnnnnnnnnnnnnnnnnnnnnnnnnnnnnnnnnnnnnnnnnnnnnnnnnnnnnnnnnnnnnnnnnnnnnnnnnnnnnnnnnnnnnnnnnnnnnnnnnnnnnnnnnnnnnnnnnnnnnnnnnnnnnnnnnnnnnnnnnnnnnnnnnnnnnnnnnnnnnnnnnnnnnnnnnnnnnnnnnnnnnnnnnnnnnnnnnnnnnnnnnnnnnnnnnnnnnnnnnnnnnnnnnnnnnnnnnnnnnnnnnnnnnnnnnnnnnnnnnnnnnnnnnnnnnnnnnnnnnnnnnnnnnnnnnnnnnnnnnnnnnnnnnnnnnnnnnnnnnnnnnnnnnnnnnnnnnnnnnnnnnnnnnnnnnnnnnnnnnnnnnnnnnnnnnnnnnnnnnnnnnnnnnnnnnnnnnnnnnnnnnnnnnnnnnnnnnnnnnnnnnnnnnnnnnnnnnnnnnnnnnnnnnnnnnnnnnnnnnnnnnnnnnnnnnnnnnnnnnnnnnnnnnnnnnnnnnnnnnnnnnnnnnnnnnnnnnnnnnnnnnnnnnnnnnnnnnnnnnnnnnnnnnnnnnnnnnnnnnnnnnnnnnnnnnnnnnnnnnnnnnnnnnnnnnnnnnnnnnnnnnnnnnnnnnnnnnnnnnnnnnnnnnnnnnnnnnnnnnnnnnnnnnnnnnnnnnnnnnnnnnnnnnnnnnnnnnnnnnnnnnnnnnnnnnnnnnnnnnnnnnnnnnnnnnnnnnnnnnnnnnnnnnnnnnnnnnnnnnnnnnnnnnnnnnnnnnnnnnnnnnnnnnnnnnnnnnnnnnnnnnnnnnnnnnnnnnnnnnnnnnnnnnnnnnnnnnnnnnnnnnnnnnnnnnnnnnnnnnnnnnnnnnnnnnnnnnnnnnnnnnnnnnnnnnnnnnnnnnnnnnnnnnnnnnnnnnnnnnnnnnnnnnnnnnnnnnnnnnnnnnnnnnnnnnnnnnnnnnnnnnnnnnnnnnnnnnnnnnnnnnnnnnnnnnnnnnnnnnnnnnnnnnnnnnnnnnnnnnnnnnnnnnnnnnnnnnnnnnnnnnnnnnnnnnnnnnnnnnnnnnnnnnnnnnnnnnnnnnnnnnnnnnnnnnnnnnnnnnnnnnnnnnnnnnnnnnnnnnnnnnnnnnnnnnnnnnnnnnnnnnnnnnnnnnnnnnnnnnnnnnnnnnnnnnnnnnnnnnnnnnnnnnnnnnnnnnnnnnnnnnnnnnnnnnnnnnnnnnnnnnnnnnnnnnnnnnnnnnnnnnnnnnnnnnnnnnnnnnnnnnnnnnnnnnnnnnnnnnnnnnnnnnnnnnnnnnnnnnnnnnnnnnnnnnnnnnnnnnnnnnnnnnnnnnnnnnnnnnnnnnnnnnnnnnnnnnnnnnnnnnnnnnnnnnnnnnnnnnnnnnnnnnnnnnnnnnnnnnnnnnnnnnnnnnnnnnnnnnnnnnnnnnnnnnnnnnnnnnnnnnnnnnnnnnnnnnnnnnnnnnnnnnnnnnnnnnnnnnnnnnnnnnnnnnnnnnnnnnnnnnnnnnnnnnnnnnnnnnnnnnnnnnnnnnnnnnnnnnnnnnnnnnnnnnnnnnnnnnnnnnnnnnnnnnnnnnnnnnnnnnnnnnnnnnnnnnnnnnnnnnnnnnnnnnnnnnnnnnnnnnnnnnnnnnnnnnnnnnnnnnnnnnnnnnnnnnnnnnnnnnnnnnnnnnnnnnnnnnnnnnnnnnnnnnnnnnnnnnnnnnnnnnnnnnnnnnnnnnnnnnnnnnnnnnnnnnnnnnnnnnnnnnnnnnnnnnnnnnnnnnnnnnnnnnnnnnnnnnnnnnnnnnnnnnnnnnnnnnnnnnnnnnnnnnnnnnnnnnnnnnnnnnnnnnnnnnnnnnnnnnnnnnnnnnnnnnnnnnnnnnnnnnnnnnnnnnnnnnnnnnnnnnnnnnnnnnnnnnnnnnnnnnnnnnnnnnnnnnnnnnnnnnnnnnnnnnnnnnnnnnnnnnnnnnnnnnnnnnnnnnnnnnnnnnnnnnnnnnnnnnnnnnnnnnnnnnnnnnnnnnnnnnnnnnnnnnnnnnnnnnnnnnnnnnnnnnnnnnnnnnnnnnnnnnnnnnnnnnnnnnnnnnnnnnnnnnnnnnnnnnnnnnnnnnnnnnnnnnnnnnnnnnnnnnnnnnnnnnnnnnnnnnnnnnnnnnnnnnnnnnnnnnnnnnnnnnnnnnnnnnnnnnnnnnnnnnnnnnnnnnnnnnnnnnnnnnnnnnnnnnnnnnnnnnnnnnnnnnnnnnnnnnnnnnnnnnnnnnnnnnnnnnnnnnnnnnnnnnnnnnnnnnnnnnnnnnnnnnnnnnnnnnnnnnnnnnnnnnnnnnnnnnnnnnnnnnnnnnnnnnnnnnnnnnnnnnnnnnnnnnnnnnnnnnnnnnnnnnnnnnnnnnnnnnnnnnnnnnnnnnnnnnnnnnnnnnnnnnnnnnnnnnnnnnnnnnnnnnnnnnnnnnnnnnnnnnnnnnnnnnnnnnnnnnnnnnnnnnnnnnnnnnnnnnnnnnnnnnnnnnnnnnnnnnnnnnnnnnnnnnnnnnnnnnnnnnnnnnnnnnnnnnnnnnnnnnnnnnnnnnnnnnnnnnnnnnnnnnnnnnnnnnnnnnnnnnnnnnnnnnnnnnnnnnnnnnnnnnnnnnnnnnnnnnnnnnnnnnnnnnnnnnnnnnnnnnnnnnnnnnnnnnnnnnnnnnnnnnnnnnnnnnnnnnnnnnnnnnnnnnnnnnnnnnnnnnnnnnnnnnnnnnnnnnnnnnnnnnnnnnnnnnnnnnnnnnnnnnnnnnnnnnnnnnnnnnnnnnnnnnnnnnnnnnnnnnnnnnnnnnnnnnnnnnnnnnnnnnnnnnnnnnnnnnnnnnnnnnnnnnnnnnnnnnnnnnnnnnnnnnnnnnnnnnnnnnnnnnnnnnnnnnnnnnnnnnnnnnnnnnnnnnnnnnnnnnnnnnnnnnnnnnnnnnnnnnnnnnnnnnnnnnnnnnnnnnnnnnnnnnnnnnnnnnnnnnnnnnnnnnnnnnnnnnnnnnnnnnnnnnnnnnnnnnnnnnnnnnnnnnnnnnnnnnnnnnnnnnnnnnnnnnnnnnnnnnnnnnnnnnnnnnnnnnnnnnnnnnnnnnnnnnnnnnnnnnnnnnnnnnnnnnnnnnnnnnnnnnnnnnnnnnnnnnnnnnnnnnnnnnnnnnnnnnnnnnnnnnnnnnnnnnnnnnnnnnnnnnnnnnnnnnnnnnnnnnnnnnnnnnnnnnnnnnnnnnnnnnnnnnnnnnnnnnnnnnnnnnnnnnnnnnnnnnnnnnnnnnnnnnnnnnnnnnnnnnnnnnnnnnnnnnnnnnnnnnnnnnnnnnnnnnnnnnnnnnnnnnnnnnnnnnnnnnnnnnnnnnnnnnnnnnnnnnnnnnnnnnnnnnnnnnnnnnnnnnnnnnnnnnnnnnnnnnnnnnnnnnnnnnnnnnnnnnnnnnnnnnnnnnnnnnnnnnnnnnnnnnnnnnnnnnnnnnnnnnnnnnnnnnnnnnnnnnnnnnnnnnnnnnnnnnnnnnnnnnnnnnnnnnnnnnnnnnnnnnnnnnnnnnnnnnnnnnnnnnnnnnnnnnnnnnnnnnnnnnnnnnnnnnnnnnnnnnnnnnnnnnnnnnnnnnnnnnnnnnnnnnnnnnnnnnnnnnnnnnnnnnnnnnnnnnnnnnnnnnnnnnnnnnnnnnnnnnnnnnnnnnnnnnnnnnnnnnnnnnnnnnnnnnnnnnnnnnnnnnnnnnnnnnnnnnnnnnnnnnnnnnnnnnnnnnnnnnnnnnnnnnnnnnnnnnnnnnnnnnnnnnnnnnnnnnnnnnnnnnnnnnnnnnnnnnnnnnnnnnnnnnnnnnnnnnnnnnnnnnnnnnnnnnnnnnnnnnnnnnnnnnnnnnnnnnnnnnnnnnnnnnnnnnnnnnnnnnnnnnnnnnnnnnnnnnnnnnnnnnnnnnnnnnnnnnnnnnnnnnnnnnnnnnnnnnnnnnnnnnnnnnnnnnnnnnnnnnnnnnnnnnnnnnnnnnnnnnnnnnnnnnnnnnnnnnnnnnnnnnnnnnnnnnnnnnnnnnnnnnnnnnnnnnnnnnnnnnnnnnnnnnnnnnnnnnnnnnnnnnnnnnnnnnnnnnnnnnnnnnnnnnnnnnnnnnnnnnnnnnnnnnnnnnnnnnnnnnnnnnnnnnnnnnnnnnnnnnnnnnnnnnnnnnnnnnnnnnnnnnnnnnnnnnnnnnnnnnnnnnnnnnnnnnnnnnnnnnnnnnnnnnnnnnnnnnnnnnnnnnnnnnnnnnnnnnnnnnnnnnnnnnnnnnnnnnnnnnnnnnnnnnnnnnnnnnnnnnnnnnnnnnnnnnnnnnnnnnnnnnnnnnnnnnnnnnnnnnnnnnnnnnnnnnnnnnnnnnnnnnnnnnnnnnnnnnnnnnnnnnnnnnnnnnnnnnnnnnnnnnnnnnnnnnnnnnnnnnnnnnnnnnnnnnnnnnnnnnnnnnnnnnnnnnnnnnnnnnnnnnnnnnnnnnnnnnnnnnnnnnnnnnnnnnnnnnnnnnnnnnnnnnnnnnnnnnnnnnnnnnnnnnnnnnnnnnnnnnnnnnnnnnnnnnnnnnnnnnnnnnnnnnnnnnnnnnnnnnnnnnnnnnnnnnnnnnnnnnnnnnnnnnnnnnnnnnnnnnnnnnnnnnnnnnnnnnnnnnnnnnnnnnnnnnnnnnnnnnnnnnnnnnnnnnnnnnnnnnnnnnnnnnnnnnnnnnnnnnnnnnnnnnnnnnnnnnnnnnnnnnnnnnnnnnnnnnnnnnnnnnnnnnnnnnnnnnnnnnnnnnnnnnnnnnnnnnnnnnnnnnnnnnnnnnnnnnnnnnnnnnnnnnnnnnnnnnnnnnnnnnnnnnnnnnnnnnnnnnnnnnnnnnnnnnnnnnnnnnnnnnnnnnnnnnnnnnnnnnnnnnnnnnnnnnnnnnnnnnnnnnnnnnnnnnnnnnnnnnnnnnnnnnnnnnnnnnnnnnnnnnnnnnnnnnnnnnnnnnnnnnnnnnnnnnnnnnnnnnnnnnnnnnnnnnnnnnnnnnnnnnnnnnnnnnnnnnnnnnnnnnnnnnnnnnnnnnnnnnnnnnnnnnnnnnnnnnnnnnnnnnnnnnnnnnnnnnnnnnnnnnnnnnnnnnnnnnnnnnnnnnnnnnnnnnnnnnnnnnnnnnnnnnnnnnnnnnnnnnnnnnnnnnnnnnnnnnnnnnnnnnnnnnnnnnnnnnnnnnnnnnnnnnnnnnnnnnnnnnnnnnnnnnnnnnnnnnnnnnnnnnnnnnnnnnnnnnnnnnnnnnnnnnnnnnnnnnnnnnnnnnnnnnnnnnnnnnnnnnnnnnnnnnnnnnnnnnnnnnnnnnnnnnnnnnnnnnnnnnnnnnnnnnnnnnnnnnnnnnnnnnnnnnnnnnnnnnnnnnnnnnnnnnnnnnnnnnnnnnnnnnnnnnnnnnnnnnnnnnnnnnnnnnnnnnnnnnnnnnnnnnnnnnnnnnnnnnnnnnnnnnnnnnnnnnnnnnnnnnnnnnnnnnnnnnnnnnnnnnnnnnnnnnnnnnnnnnnnnnnnnnnnnnnnnnnnnnnnnnnnnnnnnnnnnnnnnnnnnnnnnnnnnnnnnnnnnnnnnnnnnnnnnnnnnnnnnnnnnnnnnnnnnnnnnnnnnnnnnnnnnnnnnnnnnnnnnnnnnnnnnnnnnnnnnnnnnnnnnnnnnnnnnnnnnnnnnnnnnnnnnnnnnnnnnnnnnnnnnnnnnnnnnnnnnnnnnnnnnnnnnnnnnnnnnnnnnnnnnnnnnnnnnnnnnnnnnnnnnnnnnnnnnnnnnnnnnnnnnnnnnnnnnnnnnnnnnnnnnnnnnnnnnnnnnnnnnnnnnnnnnnnnnnnnnnnnnnnnnnnnnnnnnnnnnnnnnnnnnnnnnnnnnnnnnnnnnnnnnnnnnnnnnnnnnnnnnnnnnnnnnnnnnnnnnnnnnnnnnnnnnnnnnnnnnnnnnnnnnnnnnnnnnnnnnnnnnnnnnnnnnnnnnnnnnnnnnnnnnnnnnnnnnnnnnnnnnnnnnnnnnnnnnnnnnnnnnnnnnnnnnnnnnnnnnnnnnnnnnnnnnnnnnnnnnnnnnnnnnnnnnnnnnnnnnnnnnnnnnnnnnnnnnnnnnnnnnnnnnnnnnnnnnnnnnnnnnnnnnnnnnnnnnnnnnnnnnnnnnnnnnnnnnnnnnnnnnnnnnnnnnnnnnnnnnnnnnnnnnnnnnnnnnnnnnnnnnnnnnnnnnnnnnnnnnnnnnnnnnnnnnnnnnnnnnnnnnnnnnnnnnnnnnnnnnnnnnnnnnnnnnnnnnnnnnnnnnnnnnnnnnnnnnnnnnnnnnnnnnnnnnnnnnnnnnnnnnnnnnnnnnnnnnnnnnnnnnnnnnnnnnnnnnnnnnnnnnnnnnnnnnnnnnnnnnnnnnnnnnnnnnnnnnnnnnnnnnnnnnnnnnnnnnnnnnnnnnnnnnnnnnnnnnnnnnnnnnnnnnnnnnnnnnnnnnnnnnnnnnnnnnnnnnnnnnnnnnnnnnnnnnnnnnnnnnnnnnnnnnnnnnnnnnnnnnnnnnnnnnnnnnnnnnnnnnnnnnnnnnnnnnnnnnnnnnnnnnnnnnnnnnnnnnnnnnnnnnnnnnnnnnnnnnnnnnnnnnnnnnnnnnnnnnnnnnnnnnnnnnnnnnnnnnnnnnnnnnnnnnnnnnnnnnnnnnnnnnnnnnnnnnnnnnnnnnnnnnnnnnnnnnnnnnnnnnnnnnnnnnnnnnnnnnnnnnnnnnnnnnnnnnnnnnnnnnnnnnnnnnnnnnnnnnnnnnnnnnnnnnnnnnnnnnnnnnnnnnnnnnnnnnnnnnnnnnnnnnnnnnnnnnnnnnnnnnnnnnnnnnnnnnnnnnnnnnnnnnnnnnnnnnnnnnnnnnnnnnnnnnnnnnnnnnnnnnnnnnnnnnnnnnnnnnnnnnnnnnnnnnnnnnnnnnnnnnnnnnnnnnnnnnnnnnnnnnnnnnnnnnnnnnnnnnnnnnnnnnnnnnnnnnnnnnnnnnnnnnnnnnnnnnnnnnnnnnnnnnnnnnnnnnnnnnnnnnnnnnnnnnnnnnnnnnnnnnnnnnnnnnnnnnnnnnnnnnnnnnnnnnnnnnnnnnnnnnnnnnnnnnnnnnnnnnnnnnnnnnnnnnnnnnnnnnnnnnnnnnnnnnnnnnnnnnnnnnnnnnnnnnnnnnnnnnnnnnnnnnnnnnnnnnnnnnnnnnnnnnnnnnnnnnnnnnnnnnnnnnnnnnnnnnnnnnnnnnnnnnnnnnnnnnnnnnnnnnnnnnnnnnnnnnnnnnnnnnnnnnnnnnnnnnnnnnnnnnnnnnnnnnnnnnnnnnnnnnnnnnnnnnnnnnnnnnnnnnnnnnnnnnnnnnnnnnnnnnnnnnnnnnnnnnnnnnnnnnnnnnnnnnnnnnnnnnnnnnnnnnnnnnnnnnnnnnnnnnnnnnnnnnnnnnnnnnnnnnnnnnnnnnnnnnnnnnnnnnnnnnnnnnnnnnnnnnnnnnnnnnnnnnnnnnnnnnnnnnnnnnnnnnnnnnnnnnnnnnnnnnnnnnnnnnnnnnnnnnnnnnnnnnnnnnnnnnnnnnnnnnnnnnnnnnnnnnnnnnnnnnnnnnnnnnnnnnnnnnnnnnnnnnnnnnnnnnnnnnnnnnnnnnnnnnnnnnnnnnnnnnnnnnnnnnnnnnnnnnnnnnnnnnnnnnnnnnnnnnnnnnnnnnnnnnnnnnnnnnnnnnnnnnnnnnnnnnnnnnnnnnnnnnnnnnnnnnnnnnnnnnnnnnnnnnnnnnnnnnnnnnnnnnnnnnnnnnnnnnnnnnnnnnnnnnnnnnnnnnnnnnnnnnnnnnnnnnnnnnnnnnnnnnnnnnnnnnnnnnnnnnnnnnnnnnnnnnnnnnnnnnnnnnnnnnnnnnnnnnnnnnnnnnnnnnnnnnnnnnnnnnnnnnnnnnnnnnnnnnnnnnnnnnnnnnnnnnnnnnnnnnnnnnnnnnnnnnnnnnnnnnnnnnnnnnnnnnnnnnnnnnnnnnnnnnnnnnnnnnnnnnnnnnnnnnnnnnnnnnnnnnnnnnnnnnnnnnnnnnnnnnnnnnnnnnnnnnnnnnnnnnnnnnnnnnnnnnnnnnnnnnnnnnnnnnnnnnnnnnnnnnnnnnnnnnnnnnnnnnnnnnnnnnnnnnnnnnnnnnnnnnnnnnnnnnnnnnnnnnnnnnnnnnnnnnnnnnnnnnnnnnnnnnnnnnnnnnnnnnnnnnnnnnnnnnnnnnnnnnnnnnnnnnnnnnnnnnnnnnnnnnnnnnnnnnnnnnnnnnnnnnnnnnnnnnnnnnnnnnnnnnnnnnnnnnnnnnnnnnnnnnnnnnnnnnnnnnnnnnnnnnnnnnnnnnnnnnnnnnnnnnnnnnnnnnnnnnnnnnnnnnnnnnnnnnnnnnnnnnnnnnnnnnnnnnnnnnnnnnnnnnnnnnnnnnnnnnnnnnnnnnnnnnnnnnnnnnnnnnnnnnnnnnnnnnnnnnnnnnnnnnnnnnnnnnnnnnnnnnnnnnnnnnnnnnnnnnnnnnnnnnnnnnnnnnnnnnnnnnnnnnnnnnnnnnnnnnnnnnnnnnnnnnnnnnnnnnnnnnnnnnnnnnnnnnnnnnnnnnnnnnnnnnnnnnnnnnnnnnnnnnnnnnnnnnnnnnnnnnnnnnnnnnnnnnnnnnnnnnnnnnnnnnnnnnnnnnnnnnnnnnnnnnnnnnnnnnnnnnnnnnnnnnnnnnnnnnnnnnnnnnnnnnnnnnnnnnnnnnnnnnnnnnnnnnnnnnnnnnnnnnnnnnnnnnnnnnnnnnnnnnnnnnnnnnnnnnnnnnnnnnnnnnnnnnnnnnnnnnnnnnnnnnnnnnnnnnnnnnnnnnnnnnnnnnnnnnnnnnnnnnnnnnnnnnnnnnnnnnnnnnnnnnnnnnnnnnnnnnnnnnnnnnnnnnnnnnnnnnnnnnnnnnnnnnnnnnnnnnnnnnnnnnnnnnnnnnnnnnnnnnnnnnnnnnnnnnnnnnnnnnnnnnnnnnnnnnnnnnnnnnnnnnnnnnnnnnnnnnnnnnnnnnnnnnnnnnnnnnnnnnnnnnnnnnnnnnnnnnnnnnnnnnnnnnnnnnnnnnnnnnnnnnnnnnnnnnnnnnnnnnnnnnnnnnnnnnnnnnnnnnnnnnnnnnnnnnnnnnnnnnnnnnnnnnnnnnnnnnnnnnnnnnnnnnnnnnnnnnnnnnnnnnnnnnnnnnnnnnnnnnnnnnnnnnnnnnnnnnnnnnnnnnnnnnnnnnnnnnnnnnnnnnnnnnnnnnnnnnnnnnnnnnnnnnnnnnnnnnnnnnnnnnnnnnnnnnnnnnnnnnnnnnnnnnnnnnnnnnnnnnnnnnnnnnnnnnnnnnnnnnnnnnnnnnnnnnnnnnnnnnnnnnnnnnnnnnnnnnnnnnnnnnnnnnnnnnnnnnnnnnnnnnnnnnnnnnnnnnnnnnnnnnnnnnnnnnnnnnnnnnnnnnnnnnnnnnnnnnnnnnnnnnnnnnnnnnnnnnnnnnnnnnnnnnnnnnnnnnnnnnnnnnnnnnnnnnnnnnnnnnnnnnnnnnnnnnnnnnnnnnnnnnnnnnnnnnnnnnnnnnnnnnnnnnnnnnnnnnnnnnnnnnnnnnnnnnnnnnnnnnnnnnnnnnnnnnnnnnnnnnnnnnnnnnnnnnnnnnnnnnnnnnnnnnnnnnnnnnnnnnnnnnnnnnnnnnnnnnnnnnnnnnnnnnnnnnnnnnnnnnnnnnnnnnnnnnnnnnnnnnnnnnnnnnnnnnnnnnnnnnnnnnnnnnnnnnnnnnnnnnnnnnnnnnnnnnnnnnnnnnnnnnnnnnnnnnnnnnnnnnnnnnnnnnnnnnnnnnnnnnnnnnnnnnnnnnnnnnnnnnnnnnnnnnnnnnnnnnnnnnnnnnnnnnnnnnnnnnnnnnnnnnnnnnnnnnnnnnnnnnnnnnnnnnnnnnnnnnnnnnnnnnnnnnnnnnnnnnnnnnnnnnnnnnnnnnnnnnnnnnnnnnnnnnnnnnnnnnnnnnnnnnnnnnnnnnnnnnnnnnnnnnnnnnnnnnnnnnnnnnnnnnnnnnnnnnnnnnnnnnnnnnnnnnnnnnnnnnnnnnnnnnnnnnnnnnnnnnnnnnnnnnnnnnnnnnnnnnnnnnnnnnnnnnnnnnnnnnnnnnnnnnnnnnnnnnnnnnnnnnnnnnnnnnnnnnnnnnnnnnnnnnnnnnnnnnnnnnnnnnnnnnnnnnnnnnnnnnnnnnnnnnnnnnnnnnnnnnnnnnnnnnnnnnnnnnnnnnnnnnnnnnnnnnnnnnnnnnnnnnnnnnnnnnnnnnnnnnnnnnnnnnnnnnnnnnnnnnnnnnnnnnnnnnnnnnnnnnnnnnnnnnnnnnnnnnnnnnnnnnnnnnnnnnnnnnnnnnnnnnnnnnnnnnnnnnnnnnnnnnnnnnnnnnnnnnnnnnnnnnnnnnnnnnnnnnnnnnnnnnnnnnnnnnnnnnnnnnnnnnnnnnnnnnnnnnnnnnnnnnnnnnnnnnnnnnnnnnnnnnnnnnnnnnnnnnnnnnnnnnnnnnnnnnnnnnnnnnnnnnnnnnnnnnnnnnnnnnnnnnnnnnnnnnnnnnnnnnnnnnnnnnnnnnnnnnnnnnnnnnnnnnnnnnnnnnnnnnnnnnnnnnnnnnnnnnnnnnnnnnnnnnnnnnnnnnnnnnnnnnnnnnnnnnnnnnnnnnnnnnnnnnnnnnnnnnnnnnnnnnnnnnnnnnnnnnnnnnnnnnnnnnnnnnnnnnnnnnnnnnnnnnnnnnnnnnnnnnnnnnnnnnnnnnnnnnnnnnnnnnnnnnnnnnnnnnnnnnnnnnnnnnnnnnnnnnnnnnnnnnnnnnnnnnnnnnnnnnnnnnnnnnnnnnnnnnnnnnnnnnnnnnnnnnnnnnnnnnnnnnnnnnnnnnnnnnnnnnnnnnnnnnnnnnnnnnnnnnnnnnnnnnnnnnnnnnnnnnnnnnnnnnnnnnnnnnnnnnnnnnnnnnnnnnnnnnnnnnnnnnnnnnnnnnnnnnnnnnnnnnnnnnnnnnnnnnnnnnnnnnnnnnnnnnnnnnnnnnnnnnnnnnnnnnnnnnnnnnnnnnnnnnnnnnnnnnnnnnnnnnnnnnnnnnnnnnnnnnnnnnnnnnnnnnnnnnnnnnnnnnnnnnnnnnnnnnnnnnnnnnnnnnnnnnnnnnnnnnnnnnnnnnnnnnnnnnnnnnnnnnnnnnnnnnnnnnnnnnnnnnnnnnnnnnnnnnnnnnnnnnnnnnnnnnnnnnnnnnnnnnnnnnnnnnnnnnnnnnnnnnnnnnnnnnnnnnnnnnnnnnnnnnnnnnnnnnnnnnnnnnnnnnnnnnnnnnnnnnnnnnnnnnnnnnnnnnnnnnnnnnnnnnnnnnnnnnnnnnnnnnnnnnnnnnnnnnnnnnnnnnnnnnnnnnnnnnnnnnnnnnnnnnnnnnnnnnnnnnnnnnnnnnnnnnnnnnnnnnnnnnnnnnnnnnnnnnnnnnnnnnnnnnnnnnnnnnnnnnnnnnnnnnnnnnnnnnnnnnnnnnnnnnnnnnnnnnnnnnnnnnnnnnnnnnnnnnnnnnnnnnnnnnnnnnnnnnnnnnnnnnnnnnnnnnnnnnnnnnnnnnnnnnnnnnnnnnnnnnnnnnnnnnnnnnnnnnnnnnnnnnnnnnnnnnnnnnnnnnnnnnnnnnnnnnnnnnnnnnnnnnnnnnnnnnnnnnnnnnnnnnnnnnnnnnnnnnnnnnnnnnnnnnnnnnnnnnnnnnnnnnnnnnnnnnnnnnnnnnnnnnnnnnnnnnnnnnnnnnnnnnnnnnnnnnnnnnnnnnnnnnnnnnnnnnnnnnnnnnnnnnnnnnnnnnnnnnnnnnnnnnnnnnnnnnnnnnnnnnnnnnnnnnnnnnnnnnnnnnnnnnnnnnnnnnnnnnnnnnnnnnnnnnnnnnnnnnnnnnnnnnnnnnnnnnnnnnnnnnnnnnnnnnnnnnnnnnnnnnnnnnnnnnnnnnnnnnnnnnnnnnnnnnnnnnnnnnnnnnnnnnnnnnnnnnnnnnnnnnnnnnnnnnnnnnnnnnnnnnnnnnnnnnnnnnnnnnnnnnnnnnnnnnnnnnnnnnnnnnnnnnnnnnnnnnnnnnnnnnnnnnnnnnnnnnnnnnnnnnnnnnnnnnnnnnnnnnnnnnnnnnnnnnnnnnnnnnnnnnnnnnnnnnnnnnnnnnnnnnnnnnnnnnnnnnnnnnnnnnnnnnnnnnnnnnnnnnnnnnnnnnnnnnnnnnnnnnnnnnnnnnnnnnnnnnnnnnnnnnnnnnnnnnnnnnnnnnnnnnnnnnnnnnnnnnnnnnnnnnnnnnnnnnnnnnnnnnnnnnnnnnnnnnnnnnnnnnnnnnnnnnnnnnnnnnnnnnnnnnnnnnnnnnnnnnnnnnnnnnnnnnnnnnnnnnnnnnnnnnnnnnnnnnnnnnnnnnnnnnnnnnnnnnnnnnnnnnnnnnnnnnnnnnnnnnnnnnnnnnnnnnnnnnnnnnnnnnnnnnnnnnnnnnnnnnnnnnnnnnnnnnnnnnnnnnnnnnnnnnnnnnnnnnnnnnnnnnnnnnnnnnnnnnnnnnnnnnnnnnnnnnnnnnnnnnnnnnnnnnnnnnnnnnnnnnnnnnnnnnnnnnnnnnnnnnnnnnnnnnnnnnnnnnnnnnnnnnnnnnnnnnnnnnnnnnnnnnnnnnnnnnnnnnnnnnnnnnnnnnnnnnnnnnnnnnnnnnnnnnnnnnnnnnnnnnnnnnnnnnnnnnnnnnnnnnnnnnnnnnnnnnnnnnnnnnnnnnnnnnnnnnnnnnnnnnnnnnnnnnnnnnnnnnnnnnnnnnnnnnnnnnnnnnnnnnnnnnnnnnnnnnnnnnnnnnnnnnnnnnnnnnnnnnnnnnnnnnnnnnnnnnnnnnnnnnnnnnnnnnnnnnnnnnnnnnnnnnnnnnnnnnnnnnnnnnnnnnnnnnnnnnnnnnnnnnnnnnnnnnnnnnnnnnnnnnnnnnnnnnnnnnnnnnnnnnnnnnnnnnnnnnnnnnnnnnnnnnnnnnnnnnnnnnnnnnnnnnnnnnnnnnnnnnnnnnnnnnnnnnnnnnnnnnnnnnnnnnnnnnnnnnnnnnnnnnnnnnnnnnnnnnnnnnnnnnnnnnnnnnnnnnnnnnnnnnnnnnnnnnnnnnnnnnnnnnnnnnnnnnnnnnnnnnnnnnnnnnnnnnnnnnnnnnnnnnnnnnnnnnnnnnnnnnnnnnnnnnnnnnnnnnnnnnnnnnnnnnnnnnnnnnnnnnnnnnnnnnnnnnnnnnnnnnnnnnnnnnnnnnnnnnnnnnnnnnnnnnnnnnnnnnnnnnnnnnnnnnnnnnnnnnnnnnnnnnnnnnnnnnnnnnnnnnnnnnnnnnnnnnnnnnnnnnnnnnnnnnnnnnnnnnnnnnnnnnnnnnnnnnnnnnnnnnnnnnnnnnnnnnnnnnnnnnnnnnnnnnnnnnnnnnnnnnnnnnnnnnnnnnnnnnnnnnnnnnnnnnnnnnnnnnnnnnnnnnnnnnnnnnnnnnnnnnnnnnnnnnnnnnnnnnnnnnnnnnnnnnnnnnnnnnnnnnnnnnnnnnnnnnnnnnnnnnnnnnnnnnnnnnnnnnnnnnnnnnnnnnnnnnnnnnnnnnnnnnnnnnnnnnnnnnnnnnnnnnnnnnnnnnnnnnnnnnnnnnnnnnnnnnnnnnnnnnnnnnnnnnnnnnnnnnnnnnnnnnnnnnnnnnnnnnnnnnnnnnnnnnnnnnnnnnnnnnnnnnnnnnnnnnnnnnnnnnnnnnnnnnnnnnnnnnnnnnnnnnnnnnnnnnnnnnnnnnnnnnnnnnnnnnnnnnnnnnnnnnnnnnnnnnnnnnnnnnnnnnnnnnnnnnnnnnnnnnnnnnnnnnnnnnnnnnnnnnnnnnnnnnnnnnnnnnnnnnnnnnnnnnnnnnnnnnnnnnnnnnnnnnnnnnnnnnnnnnnnnnnnnnnnnnnnnnnnnnnnnnnnnnnnnnnnnnnnnnnnnnnnnnnnnnnnnnnnnnnnnnnnnnnnnnnnnnnnnnnnnnnnnnnnnnnnnnnnnnnnnnnnnnnnnnnnnnnnnnnnnnnnnnnnnnnnnnnnnnnnnnnnnnnnnnnnnnnnnnnnnnnnnnnnnnnnnnnnnnnnnnnnnnnnnnnnnnnnnnnnnnnnnnnnnnnnnnnnnnnnnnnnnnnnnnnnnnnnnnnnnnnnnnnnnnnnnnnnnnnnnnnnnnnnnnnnnnnnnnnnnnnnnnnnnnnnnnnnnnnnnnnnnnnnnnnnnnnnnnnnnnnnnnnnnnnnnnnnnnnnnnnnnnnnnnnnnnnnnnnnnnnnnnnnnnnnnnnnnnnnnnnnnnnnnnnnnnnnnnnnnnnnnnnnnnnnnnnnnnnnnnnnnnnnnnnnnnnnnnnnnnnnnnnnnnnnnnnnnnnnnnnnnnnnnnnnnnnnnnnnnnnnnnnnnnnnnnnnnnnnnnnnnnnnnnnnnnnnnnnnnnnnnnnnnnnnnnnnnnnnnnnnnnnnnnnnnnnnnnnnnnnnnnnnnnnnnnnnnnnnnnnnnnnnnnnnnnnnnnnnnnnnnnnnnnnnnnnnnnnnnnnnnnnnnnnnnnnnnnnnnnnnnnnnnnnnnnnnnnnnnnnnnnnnnnnnnnnnnnnnnnnnnnnnnnnnnnnnnnnnnnnnnnnnnnnnnnnnnnnnnnnnnnnnnnnnnnnnnnnnnnnnnnnnnnnnnnnnnnnnnnnnnnnnnnnnnnnnnnnnnnnnnnnnnnnnnnnnnnnnnnnnnnnnnnnnnnnnnnnnnnnnnnnnnnnnnnnnnnnnnnnnnnnnnnnnnnnnnnnnnnnnnnnnnnnnnnnnnnnnnnnnnnnnnnnnnnnnnnnnnnnnnnnnnnnnnnnnnnnnnnnnnnnnnnnnnnnnnnnnnnnnnnnnnnnnnnnnnnnnnnnnnnnnnnnnnnnnnnnnnnnnnnnnnnnnnnnnnnnnnnnnnnnnnnnnnnnnnnnnnnnnnnnnnnnnnnnnnnnnnnnnnnnnnnnnnnnnnnnnnnnnnnnnnnnnnnnnnnnnnnnnnnnnnnnnnnnnnnnnnnnnnnnnnnnnnnnnnnnnnnnnnnnnnnnnnnnnnnnnnnnnnnnnnnnnnnnnnnnnnnnnnnnnnnnnnnnnnnnnnnnnnnnnnnnnnnnnnnnnnnnnnnnnnnnnnnnnnnnnnnnnnnnnnnnnnnnnnnnnnnnnnnnnnnnnnnnnnnnnnnnnnnnnnnnnnnnnnnnnnnnnnnnnnnnnnnnnnnnnnnnnnnnnnnnnnnnnnnnnnnnnnnnnnnnnnnnnnnnnnnnnnnnnnnnnnnnnnnnnnnnnnnnnnnnnnnnnnnnnnnnnnnnnnnnnnnnnnnnnnnnnnnnnnnnnnnnnnnnnnnnnnnnnnnnnnnnnnnnnnnnnnnnnnnnnnnnnnnnnnnnnnnnnnnnnnnnnnnnnnnnnnnnnnnnnnnnnnnnnnnnnnnnnnnnnnnnnnnnnnnnnnnnnnnnnnnnnnnnnnnnnnnnnnnnnnnnnnnnnnnnnnnnnnnnnnnnnnnnnnnnnnnnnnnnnnnnnnnnnnnnnnnnnnnnnnnnnnnnnnnnnnnnnnnnnnnnnnnnnnnnnnnnnnnnnnnnnnnnnnnnnnnnnnnnnnnnnnnnnnnnnnnnnnnnnnnnnnnnnnnnnnnnnnnnnnnnnnnnnnnnnnnnnnnnnnnnnnnnnnnnnnnnnnnnnnnnnnnnnnnnnnnnnnnnnnnnnnnnnnnnnnnnnnnnnnnnnnnnnnnnnnnnnnnnnnnnnnnnnnnnnnnnnnnnnnnnnnnnnnnnnnnnnnnnnnnnnnnnnnnnnnnnnnnnnnnnnnnnnnnnnnnnnnnnnnnnnnnnnnnnnnnnnnnnnnnnnnnnnnnnnnnnnnnnnnnnnnnnnnnnnnnnnnnnnnnnnnnnnnnnnnnnnnnnnnnnnnnnnnnnnnnnnnnnnnnnnnnnnnnnnnnnnnnnnnnnnnnnnnnnnnnnnnnnnnnnnnnnnnnnnnnnnnnnnnnnnnnnnnnnnnnnnnnnnnnnnnnnnnnnnnnnnnnnnnnnnnnnnnnnnnnnnnnnnnnnnnnnnnnnnnnnnnnnnnnnnnnnnnnnnnnnnnnnnnnnnnnnnnnnnnnnnnnnnnnnnnnnnnnnnnnnnnnnnnnnnnnnnnnnnnnnnnnnnnnnnnnnnnnnnnnnnnnnnnnnnnnnnnnnnnnnnnnnnnnnnnnnnnnnnnnnnnnnnnnnnnnnnnnnnnnnnnnnnnnnnnnnnnnnnnnnnnnnnnnnnnnnnnnnnnnnnnnnnnnnnnnnnnnnnnnnnnnnnnnnnnnnnnnnnnnnnnnnnnnnnnnnnnnnnnnnnnnnnnnnnnnnnnnnnnnnnnnnnnnnnnnnnnnnnnnnnnnnnnnnnnnnnnnnnnnnnnnnnnnnnnnnnnnnnnnnnnnnnnnnnnnnnnnnnnnnnnnnnnnnnnnnnnnnnnnnnnnnnnnnnnnnnnnnnnnnnnnnnnnnnnnnnnnnnnnnnnnnnnnnnnnnnnnnnnnnnnnnnnnnnnnnnnnnnnnnnnnnnnnnnnnnnnnnnnnnnnnnnnnnnnnnnnnnnnnnnnnnnnnnnnnnnnnnnnnnnnnnnnnnnnnnnnnnnnnnnnnnnnnnnnnnnnnnnnnnnnnnnnnnnnnnnnnnnnnnnnnnnnnnnnnnnnnnnnnnnnnnnnnnnnnnnnnnnnnnnnnnnnnnnnnnnnnnnnnnnnnnnnnnnnnnnnnnnnnnnnnnnnnnnnnnnnnnnnnnnnnnnnnnnnnnnnnnnnnnnnnnnnnnnnnnnnnnnnnnnnnnnnnnnnnnnnnnnnnnnnnnnnnnnnnnnnnnnnnnnnnnnnnnnnnnnnnnnnnnnnnnnnnnnnnnnnnnnnnnnnnnnnnnnnnnnnnnnnnnnnnnnnnnnnnnnnnnnnnnnnnnnnnnnnnnnnnnnnnnnnnnnnnnnnnnnnnnnnnnnnnnnnnnnnnnnnnnnnnnnnnnnnnnnnnnnnnnnnnnnnnnnnnnnnnnnnnnnnnnnnnnnnnnnnnnnnnnnnnnnnnnnnnnnnnnnnnnnnnnnnnnnnnnnnnnnnnnnnnnnnnnnnnnnnnnnnnnnnnnnnnnnnnnnnnnnnnnnnnnnnnnnnnnnnnnnnnnnnnnnnnnnnnnnnnnnnnnnnnnnnnnnnnnnnnnnnnnnnnnnnnnnnnnnnnnnnnnnnnnnnnnnnnnnnnnnnnnnnnnnnnnnnnnnnnnnnnnnnnnnnnnnnnnnnnnnnnnnnnnnnnnnnnnnnnnnnnnnnnnnnnnnnnnnnnnnnnnnnnnnnnnnnnnnnnnnnnnnnnnnnnnnnnnnnnnnnnnnnnnnnnnnnnnnnnnnnnnnnnnnnnnnnnnnnnnnnnnnnnnnnnnnnnnnnnnnnnnnnnnnnnnnnnnnnnnnnnnnnnnnnnnnnnnnnnnnnnnnnnnnnnnnnnnnnnnnnnnnnnnnnnnnnnnnnnnnnnnnnnnnnnnnnnnnnnnnnnnnnnnnnnnnnnnnnnnnnnnnnnnnnnnnnnnnnnnnnnnnnnnnnnnnnnnnnnnnnnnnnnnnnnnnnnnnnnnnnnnnnnnnnnnnnnnnnnnnnnnnnnnnnnnnnnnnnnnnnnnnnnnnnnnnnnnnnnnnnnnnnnnnnnnnnnnnnnnnnnnnnnnnnnnnnnnnnnnnnnnnnnnnnnnnnnnnnnnnnnnnnnnnnnnnnnnnnnnnnnnnnnnnnnnnnnnnnnnnnnnnnnnnnnnnnnnnnnnnnnnnnnnnnnnnnnnnnnnnnnnnnnnnnnnnnnnnnnnnnnnnnnnnnnnnnnnnnnnnnnnnnnnnnnnnnnnnnnnnnnnnnnnnnnnnnnnnnnnnnnnnnnnnnnnnnnnnnnnnnnnnnnnnnnnnnnnnnnnnnnnnnnnnnnnnnnnnnnnnnnnnnnnnnnnnnnnnnnnnnnnnnnnnnnnnnnnnnnnnnnnnnnnnnnnnnnnnnnnnnnnnnnnnnnnnnnnnnnnnnnnnnnnnnnnnnnnnnnnnnnnnnnnnnnnnnnnnnnnnnnnnnnnnnnnnnnnnnnnnnnnnnnnnnnnnnnnnnnnnnnnnnnnnnnnnnnnnnnnnnnnnnnnnnnnnnnnnnnnnnnnnnnnnnnnnnnnnnnnnnnnnnnnnnnnnnnnnnnnnnnnnnnnnnnnnnnnnnnnnnnnnnnnnnnnnnnnnnnnnnnnnnnnnnnnnnnnnnnnnnnnnnnnnnnnnnnnnnnnnnnnnnnnnnnnnnnnnnnnnnnnnnnnnnnnnnnnnnnnnnnnnnnnnnnnnnnnnnnnnnnnnnnnnnnnnnnnnnnnnnnnnnnnnnnnnnnnnnnnnnnnnnnnnnnnnnnnnnnnnnnnnnnnnnnnnnnnnnnnnnnnnnnnnnnnnnnnnnnnnnnnnnnnnnnnnnnnnnnnnnnnnnnnnnnnnnnnnnnnnnnnnnnnnnnnnnnnnnnnnnnnnnnnnnnnnnnnnnnnnnnnnnnnnnnnnnnnnnnnnnnnnnnnnnnnnnnnnnnnnnnnnnnnnnnnnnnnnnnnnnnnnnnnnnnnnnnnnnnnnnnnnnnnnnnnnnnnnnnnnnnnnnnnnnnnnnnnnnnnnnnnnnnnnnnnnnnnnnnnnnnnnnnnnnnnnnnnnnnnnnnnnnnnnnnnnnnnnnnnnnnnnnnnnnnnnnnnnnnnnnnnnnnnnnnnnnnnnnnnnnnnnnnnnnnnnnnnnnnnnnnnnnnnnnnnnnnnnnnnnnnnnnnnnnnnnnnnnnnnnnnnnnnnnnnnnnnnnnnnnnnnnnnnnnnnnnnnnnnnnnnnnnnnnnnnnnnnnnnnnnnnnnnnnnnnnnnnnnnnnnnnnnnnnnnnnnnnnnnnnnnnnnnnnnnnnnnnnnnnnnnnnnnnnnnnnnnnnnnnnnnnnnnnnnnnnnnnnnnnnnnnnnnnnnnnnnnnnnnnnnnnnnnnnnnnnnnnnnnnnnnnnnnnnnnnnnnnnnnnnnnnnnnnnnnnnnnnnnnnnnnnnnnnnnnnnnnnnnnnnnnnnnnnnnnnnnnnnnnnnnnnnnnnnnnnnnnnnnnnnnnnnnnnnnnnnnnnnnnnnnnnnnnnnnnnnnnnnnnnnnnnnnnnnnnnnnnnnnnnnnnnnnnnnnnnnnnnnnnnnnnnnnnnnnnnnnnnnnnnnnnnnnnnnnnnnnnnnnnnnnnnnnnnnnnnnnnnnnnnnnnnnnnnnnnnnnnnnnnnnnnnnnnnnnnnnnnnnnnnnnnnnnnnnnnnnnnnnnnnnnnnnnnnnnnnnnnnnnnnnnnnnnnnnnnnnnnnnnnnnnnnnnnnnnnnnnnnnnnnnnnnnnnnnnnnnnnnnnnnnnnnnnnnnnnnnnnnnnnnnnnnnnnnnnnnnnnnnnnnnnnnnnnnnnnnnnnnnnnnnnnnnnnnnnnnnnnnnnnnnnnnnnnnnnnnnnnnnnnnnnnnnnnnnnnnnnnnnnnnnnnnnnnnnnnnnnnnnnnnnnnnnnnnnnnnnnnnnnnnnnnnnnnnnnnnnnnnnnnnnnnnnnnnnnnnnnnnnnnnnnnnnnnnnnnnnnnnnnnnnnnnnnnnnnnnnnnnnnnnnnnnnnnnnnnnnnnnnnnnnnnnnnnnnnnnnnnnnnnnnnnnnnnnnnnnnnnnnnnnnnnnnnnnnnnnnnnnnnnnnnnnnnnnnnnnnnnnnnnnnnnnnnnnnnnnnnnnnnnnnnnnnnnnnnnnnnnnnnnnnnnnnnnnnnnnnnnnnnnnnnnnnnnnnnnnnnnnnnnnnnnnnnnnnnnnnnnnnnnnnnnnnnnnnnnnnnnnnnnnnnnnnnnnnnnnnnnnnnnnnnnnnnnnnnnnnnnnnnnnnnnnnnnnnnnnnnnnnnnnnnnnnnnnnnnnnnnnnnnnnnnnnnnnnnnnnnnnnnnnnnnnnnnnnnnnnnnnnnnnnnnnnnnnnnnnnnnnnnnnnnnnnnnnnnnnnnnnnnnnnnnnnnnnnnnnnnnnnnnnnnnnnnnnnnnnnnnnnnnnnnnnnnnnnnnnnnnnnnnnnnnnnnnnnnnnnnnnnnnnnnnnnnnnnnnnnnnnnnnnnnnnnnnnnnnnnnnnnnnnnnnnnnnnnnnnnnnnnnnnnnnnnnnnnnnnnnnnnnnnnnnnnnnnnnnnnnnnnnnnnnnnnnnnnnnnnnnnnnnnnnnnnnnnnnnnnnnnnnnnnnnnnnnnnnnnnnnnnnnnnnnnnnnnnnnnnnnnnnnnnnnnnnnnnnnnnnnnnnnnnnnnnnnnnnnnnnnnnnnnnnnnnnnnnnnnnnnnnnnnnnnnnnnnnnnnnnnnnnnnnnnnnnnnnnnnnnnnnnnnnnnnnnnnnnnnnnnnnnnnnnnnnnnnnnnnnnnnnnnnnnnnnnnnnnnnnnnnnnnnnnnnnnnnnnnnnnnnnnnnnnnnnnnnnnnnnnnnnnnnnnnnnnnnnnnnnnnnnnnnnnnnnnnnnnnnnnnnnnnnnnnnnnnnnnnnnnnnnnnnnnnnnnnnnnnnnnnnnnnnnnnnnnnnnnnnnnnnnnnnnnnnnnnnnnnnnnnnnnnnnnnnnnnnnnnnnnnnnnnnnnnnnnnnnnnnnnnnnnnnnnnnnnnnnnnnnnnnnnnnnnnnnnnnnnnnnnnnnnnnnnnnnnnnnnnnnnnnnnnnnnnnnnnnnnnnnnnnnnnnnnnnnnnnnnnnnnnnnnnnnnnnnnnnnnnnnnnnnnnnnnnnnnnnnnnnnnnnnnnnnnnnnnnnnnnnnnnnnnnnnnnnnnnnnnnnnnnnnnnnnnnnnnnnnnnnnnnnnnnnnnnnnnnnnnnnnnnnnnnnnnnnnnnnnnnnnnnnnnnnnnnnnnnnnnnnnnnnnnnnnnnnnnnnnnnnnnnnnnnnnnnnnnnnnnnnnnnnnnnnnnnnnnnnnnnnnnnnnnnnnnnnnnnnnnnnnnnnnnnnnnnnnnnnnnnnnnnnnnnnnnnnnnnnnnnnnnnnnnnnnnnnnnnnnnnnnnnnnnnnnnnnnnnnnnnnnnnnnnnnnnnnnnnnnnnnnnnnnnnnnnnnnnnnnnnnnnnnnnnnnnnnnnnnnnnnnnnnnnnnnnnnnnnnnnnnnnnnnnnnnnnnnnnnnnnnnnnnnnnnnnnnnnnnnnnnnnnnnnnnnnnnnnnnnnnnnnnnnnnnnnnnnnnnnnnnnnnnnnnnnnnnnnnnnnnnnnnnnnnnnnnnnnnnnnnnnnnnnnnnnnnnnnnnnnnnnnnnnnnnnnnnnnnnnnnnnnnnnnnnnnnnnnnnnnnnnnnnnnnnnnnnnnnnnnnnnnnnnnnnnnnnnnnnnnnnnnnnnnnnnnnnnnnnnnnnnnnnnnnnnnnnnnnnnnnnnnnnnnnnnnnnnnnnnnnnnnnnnnnnnnnnnnnnnnnnnnnnnnnnnnnnnnnnnnnnnnnnnnnnnnnnnnnnnnnnnnnnnnnnnnnnnnnnnnnnnnnnnnnnnnnnnnnnnnnnnnnnnnnnnnnnnnnnnnnnnnnnnnnnnnnnnnnnnnnnnnnnnnnnnnnnnnnnnnnnnnnnnnnnnnnnnnnnnnnnnnnnnnnnnnnnnnnnnnnnnnnnnnnnnnnnnnnnnnnnnnnnnnnnnnnnnnnnnnnnnnnnnnnnnnnnnnnnnnnnnnnnnnnnnnnnnnnnnnnnnnnnnnnnnnnnnnnnnnnnnnnnnnnnnnnnnnnnnnnnnnnnnnnnnnnnnnnnnnnnnnnnnnnnnnnnnnnnnnnnnnnnnnnnnnnnnnnnnnnnnnnnnnnnnnnnnnnnnnnnnnnnnnnnnnnnnnnnnnnnnnnnnnnnnnnnnnnnnnnnnnnnnnnnnnnnnnnnnnnnnnnnnnnnnnnnnnnnnnnnnnnnnnnnnnnnnnnnnnnnnnnnnnnnnnnnnnnnnnnnnnnnnnnnnnnnnnnnnnnnnnnnnnnnnnnnnnnnnnnnnnnnnnnnnnnnnnnnnnnnnnnnnnnnnnnnnnnnnnnnnnnnnnnnnnnnnnnnnnnnnnnnnnnnnnnnnnnnnnnnnnnnnnnnnnnnnnnnnnnnnnnnnnnnnnnnnnnnnnnnnnnnnnnnnnnnnnnnnnnnnnnnnnnnnnnnnnnnnnnnnnnnnnnnnnnnnnnnnnnnnnnnnnnnnnnnnnnnnnnnnnnnnnnnnnnnnnnnnnnnnnnnnnnnnnnnnnnnnnnnnnnnnnnnnnnnnnnnnnnnnnnnnnnnnnnnnnnnnnnnnnnnnnnnnnnnnnnnnnnnnnnnnnnnnnnnnnnnnnnnnnnnnnnnnnnnnnnnnnnnnnnnnnnnnnnnnnnnnnnnnnnnnnnnnnnnnnnnnnnnnnnnnnnnnnnnnnnnnnnnnnnnnnnnnnnnnnnnnnnnnnnnnnnnnnnnnnnnnnnnnnnnnnnnnnnnnnnnnnnnnnnnnnnnnnnnnnnnnnnnnnnnnnnnnnnnnnnnnnnnnnnnnnnnnnnnnnnnnnnnnnnnnnnnnnnnnnnnnnnnnnnnnnnnnnnnnnnnnnnnnnnnnnnnnnnnnnnnnnnnnnnnnnnnnnnnnnnnnnnnnnnnnnnnnnnnnnnnnnnnnnnnnnnnnnnnnnnnnnnnnnnnnnnnnnnnnnnnnnnnnnnnnnnnnnnnnnnnnnnnnnnnnnnnnnnnnnnnnnnnnnnnnnnnnnnnnnnnnnnnnnnnnnnnnnnnnnnnnnnnnnnnnnnnnnnnnnnnnnnnnnnnnnnnnnnnnnnnnnnnnnnnnnnnnnnnnnnnnnnnnnnnnnnnnnnnnnnnnnnnnnnnnnnnnnnnnnnnnnnnnnnnnnnnnnnnnnnnnnnnnnnnnnnnnnnnnnnnnnnnnnnnnnnnnnnnnnnnnnnnnnnnnnnnnnnnnnnnnnnnnnnnnnnnnnnnnnnnnnnnnnnnnnnnnnnnnnnnnnnnnnnnnnnnnnnnnnnnnnnnnnnnnnnnnnnnnnnnnnnnnnnnnnnnnnnnnnnnnnnnnnnnnnnnnnnnnnnnnnnnnnnnnnnnnnnnnnnnnnnnnnnnnnnnnnnnnnnnnnnnnnnnnnnnnnnnnnnnnnnnnnnnnnnnnnnnnnnnnnnnnnnnnnnnnnnnnnnnnnnnnnnnnnnnnnnnnnnnnnnnnnnnnnnnnnnnnnnnnnnnnnnnnnnnnnnnnnnnnnnnnnnnnnnnnnnnnnnnnnnnnnnnnnnnnnnnnnnnnnnnnnnnnnnnnnnnnnnnnnnnnnnnnnnnnnnnnnnnnnnnnnnnnnnnnnnnnnnnnnnnnnnnnnnnnnnnnnnnnnnnnnnnnnnnnnnnnnnnnnnnnnnnnnnnnnnnnnnnnnnnnnnnnnnnnnnnnnnnnnnnnnnnnnnnnnnnnnnnnnnnnnnnnnnnnnnnnnnnnnnnnnnnnnnnnnnnnnnnnnnnnnnnnnnnnnnnnnnnnnnnnnnnnnnnnnnnnnnnnnnnnnnnnnnnnnnnnnnnnnnnnnnnnnnnnnnnnnnnnnnnnnnnnnnnnnnnnnnnnnnnnnnnnnnnnnnnnnnnnnnnnnnnnnnnnnnnnnnnnnnnnnnnnnnnnnnnnnnnnnnnnnnnnnnnnnnnnnnnnnnnnnnnnnnnnnnnnnnnnnnnnnnnnnnnnnnnnnnnnnnnnnnnnnnnnnnnnnnnnnnnnnnnnnnnnnnnnnnnnnnnnnnnnnnnnnnnnnnnnnnnnnnnnnnnnnnnnnnnnnnnnnnnnnnnnnnnnnnnnnnnnnnnnnnnnnnnnnnnnnnnnnnnnnnnnnnnnnnnnnnnnnnnnnnnnnnnnnnnnnnnnnnnnnnnnnnnnnnnnnnnnnnnnnnnnnnnnnnnnnnnnnnnnnnnnnnnnnnnnnnnnnnnnnnnnnnnnnnnnnnnnnnnnnnnnnnnnnnnnnnnnnnnnnnnnnnnnnnnnnnnnnnnnnnnnnnnnnnnnnnnnnnnnnnnnnnnnnnnnnnnnnnnnnnnnnnnnnnnnnnnnnnnnnnnnnnnnnnnnnnnnnnnnnnnnnnnnnnnnnnnnnnnnnnnnnnnnnnnnnnnnnnnnnnnnnnnnnnnnnnnnnnnnnnnnnnnnnnnnnnnnnnnnnnnnnnnnnnnnnnnnnnnnnnnnnnnnnnnnnnnnnnnnnnnnnnnnnnnnnnnnnnnnnnnnnnnnnnnnnnnnnnnnnnnnnnnnnnnnnnnnnnnnnnnnnnnnnnnnnnnnnnnnnnnnnnnnnnnnnnnnnnnnnnnnnnnnnnnnnnnnnnnnnnnnnnnnnnnnnnnnnnnnnnnnnnnnnnnnnnnnnnnnnnnnnnnnnnnnnnnnnnnnnnnnnnnnnnnnnnnnnnnnnnnnnnnnnnnnnnnnnnnnnnnnnnnnnnnnnnnnnnnnnnnnnnnnnnnnnnnnnnnnnnnnnnnnnnnnnnnnnnnnnnnnnnnnnnnnnnnnnnnnnnnnnnnnnnnnnnnnnnnnnnnnnnnnnnnnnnnnnnnnnnnnnnnnnnnnnnnnnnnnnnnnnnnnnnnnnnnnnnnnnnnnnnnnnnnnnnnnnnnnnnnnnnnnnnnnnnnnnnnnnnnnnnnnnnnnnnnnnnnnnnnnnnnnnnnnnnnnnnnnnnnnnnnnnnnnnnnnnnnnnnnnnnnnnnnnnnnnnnnnnnnnnnnnnnnnnnnnnnnnnnnnnnnnnnnnnnnnnnnnnnnnnnnnnnnnnnnnnnnnnnnnnnnnnnnnnnnnnnnnnnnnnnnnnnnnnnnnnnnnnnnnnnnnnnnnnnnnnnnnnnnnnnnnnnnnnnnnnnnnnnnnnnnnnnnnnnnnnnnnnnnnnnnnnnnnnnnnnnnnnnnnnnnnnnnnnnnnnnnnnnnnnnnnnnnnnnnnnnnnnnnnnnnnnnnnnnnnnnnnnnnnnnnnnnnnnnnnnnnnnnnnnnnnnnnnnnnnnnnnnnnnnnnnnnnnnnnnnnnnnnnnnnnnnnnnnnnnnnnnnnnnnnnnnnnnnnnnnnnnnnnnnnnnnnnnnnnnnnnnnnnnnnnnnnnnnnnnnnnnnnnnnnnnnnnnnnnnnnnnnnnnnnnnnnnnnnnnnnnnnnnnnnnnnnnnnnnnnnnnnnnnnnnnnnnnnnnnnnnnnnnnnnnnnnnnnnnnnnnnnnnnnnnnnnnnnnnnnnnnnnnnnnnnnnnnnnnnnnnnnnnnnnnnnnnnnnnnnnnnnnnnnnnnnnnnnnnnnnnnnnnnnnnnnnnnnnnnnnnnnnnnnnnnnnnnnnnnnnnnnnnnnnnnnnnnnnnnnnnnnnnnnnnnnnnnnnnnnnnnnnnnnnnnnnnnnnnnnnnnnnnnnnnnnnnnnnnnnnnnnnnnnnnnnnnnnnnnnnnnnnnnnnnnnnnnnnnnnnnnnnnnnnnnnnnnnnnnnnnnnnnnnnnnnnnnnnnnnnnnnnnnnnnnnnnnnnnnnnnnnnnnnnnnnnnnnnnnnnnnnnnnnnnnnnnnnnnnnnnnnnnnnnnnnnnnnnnnnnnnnnnnnnnnnnnnnnnnnnnnnnnnnnnnnnnnnnnnnnnnnnnnnnnnnnnnnnnnnnnnnnnnnnnnnnnnnnnnnnnnnnnnnnnnnnnnnnnnnnnnnnnnnnnnnnnnnnnnnnnnnnnnnnnnnnnnnnnnnnnnnnnnnnnnnnnnnnnnnnnnnnnnnnnnnnnnnnnnnnnnnnnnnnnnnnnnnnnnnnnnnnnnnnnnnnnnnnnnnnnnnnnnnnnnnnnnnnnnnnnnnnnnnnnnnnnnnnnnnnnnnnnnnnnnnnnnnnnnnnnnnnnnnnnnnnnnnnnnnnnnnnnnnnnnnnnnnnnnnnnnnnnnnnnnnnnnnnnnnnnnnnnnnnnnnnnnnnnnnnnnnnnnnnnnnnnnnnnnnnnnnnnnnnnnnnnnnnnnnnnnnnnnnnnnnnnnnnnnnnnnnnnnnnnnnnnnnnnnnnnnnnnnnnnnnnnnnnnnnnnnnnnnnnnnnnnnnnnnnnnnnnnnnnnnnnnnnnnnnnnnnnnnnnnnnnnnnnnnnnnnnnnnnnnnnnnnnnnnnnnnnnnnnnnnnnnnnnnnnnnnnnnnnnnnnnnnnnnnnnnnnnnnnnnnnnnnnnnnnnnnnnnnnnnnnnnnnnnnnnnnnnnnnnnnnnnnnnnnnnnnnnnnnnnnnnnnnnnnnnnnnnnnnnnnnnnnnnnnnnnnnnnnnnnnnnnnnnnnnnnnnnnnnnnnnnnnnnnnnnnnnnnnnnnnnnnnnnnnnnnnnnnnnnnnnnnnnnnnnnnnnnnnnnnnnnnnnnnnnnnnnnnnnnnnnnnnnnnnnnnnnnnnnnnnnnnnnnnnnnnnnnnnnnnnnnnnnnnnnnnnnnnnnnnnnnnnnnnnnnnnnnnnnnnnnnnnnnnnnnnnnnnnnnnnnnnnnnnnnnnnnnnnnnnnnnnnnnnnnnnnnnnnnnnnnnnnnnnnnnnnnnnnnnnnnnnnnnnnnnnnnnnnnnnnnnnnnnnnnnnnnnnnnnnnnnnnnnnnnnnnnnnnnnnnnnnnnnnnnnnnnnnnnnnnnnnnnnnnnnnnnnnnnnnnnnnnnnnnnnnnnnnnnnnnnnnnnnnnnnnnnnnnnnnnnnnnnnnnnnnnnnnnnnnnnnnnnnnnnnnnnnnnnnnnnnnnnnnnnnnnnnnnnnnnnnnnnnnnnnnnnnnnnnnnnnnnnnnnnnnnnnnnnnnnnnnnnnnnnnnnnnnnnnnnnnnnnnnnnnnnnnnnnnnnnnnnnnnnnnnnnnnnnnnnnnnnnnnnnnnnnnnnnnnnnnnnnnnnnnnnnnnnnnnnnnnnnnnnnnnnnnnnnnnnnnnnnnnnnnnnnnnnnnnnnnnnnnnnnnnnnnnnnnnnnnnnnnnnnnnnnnnnnnnnnnnnnnnnnnnnnnnnnnnnnnnnnnnnnnnnnnnnnnnnnnnnnnnnnnnnnnnnnnnnnnnnnnnnnnnnnnnnnnnnnnnnnnnnnnnnnnnnnnnnnnnnnnnnnnnnnnnnnnnnnnnnnnnnnnnnnnnnnnnnnnnnnnnnnnnnnnnnnnnnnnnnnnnnnnnnnnnnnnnnnnnnnnnnnnnnnnnnnnnnnnnnnnnnnnnnnnnnnnnnnnnnnnnnnnnnnnnnnnnnnnnnnnnnnnnnnnnnnnnnnnnnnnnnnnnnnnnnnnnnnnnnnnnnnnnnnnnnnnnnnnnnnnnnnnnnnnnnnnnnnnnnnnnnnnnnnnnnnnnnnnnnnnnnnnnnnnnnnnnnnnnnnnnnnnnnnnnnnnnnnnnnnnnnnnnnnnnnnnnnnnnnnnnnnnnnnnnnnnnnnnnnnnnnnnnnnnnnnnnnnnnnnnnnnnnnnnnnnnnnnnnnnnnnnnnnnnnnnnnnnnnnnnnnnnnnnnnnnnnnnnnnnnnnnnnnnnnnnnnnnnnnnnnnnnnnnnnnnnnnnnnnnnnnnnnnnnnnnnnnnnnnnnnnnnnnnnnnnnnnnnnnnnnnnnnnnnnnnnnnnnnnnnnnnnnnnnnnnnnnnnnnnnnnnnnnnnnnnnnnnnnnnnnnnnnnnnnnnnnnnnnnnnnnnnnnnnnnnnnnnnnnnnnnnnnnnnnnnnnnnnnnnnnnnnnnnnnnnnnnnnnnnnnnnnnnnnnnnnnnnnnnnnnnnnnnnnnnnnnnnnnnnnnnnnnnnnnnnnnnnnnnnnnnnnnnnnnnnnnnnnnnnnnnnnnnnnnnnnnnnnnnnnnnnnnnnnnnnnnnnnnnnnnnnnnnnnnnnnnnnnnnnnnnnnnnnnnnnnnnnnnnnnnnnnnnnnnnnnnnnnnnnnnnnnnnnnnnnnnnnnnnnnnnnnnnnnnnnnnnnnnnnnnnnnnnnnnnnnnnnnnnnnnnnnnnnnnnnnnnnnnnnnnnnnnnnnnnnnnnnnnnnnnnnnnnnnnnnnnnnnnnnnnnnnnnnnnnnnnnnnnnnnnnnnnnnnnnnnnnnnnnnnnnnnnnnnnnnnnnnnnnnnnnnnnnnnnnnnnnnnnnnnnnnnnnnnnnnnnnnnnnnnnnnnnnnnnnnnnnnnnnnnnnnnnnnnnnnnnnnnnnnnnnnnnnnnnnnnnnnnnnnnnnnnnnnnnnnnnnnnnnnnnnnnnnnnnnnnnnnnnnnnnnnnnnnnnnnnnnnnnnnnnnnnnnnnnnnnnnnnnnnnnnnnnnnnnnnnnnnnnnnnnnnnnnnnnnnnnnnnnnnnnnnnnnnnnnnnnnnnnnnnnnnnnnnnnnnnnnnnnnnnnnnnnnnnnnnnnnnnnnnnnnnnnnnnnnnnnnnnnnnnnnnnnnnnnnnnnnnnnnnnnnnnnnnnnnnnnnnnnnnnnnnnnnnnnnnnnnnnnnnnnnnnnnnnnnnnnnnnnnnnnnnnnnnnnnnnnnnnnnnnnnnnnnnnnnnnnnnnnnnnnnnnnnnnnnnnnnnnnnnnnnnnnnnnnnnnnnnnnnnnnnnnnnnnnnnnnnnnnnnnnnnnnnnnnnnnnnnnnnnnnnnnnnnnnnnnnnnnnnnnnnnnnnnnnnnnnnnnnnnnnnnnnnnnnnnnnnnnnnnnnnnnnnnnnnnnnnnnnnnnnnnnnnnnnnnnnnnnnnnnnnnnnnnnnnnnnnnnnnnnnnnnnnnnnnnnnnnnnnnnnnnnnnnnnnnnnnnnnnnnnnnnnnnnnnnnnnnnnnnnnnnnnnnnnnnnnnnnnnnnnnnnnnnnnnnnnnnnnnnnnnnnnnnnnnnnnnnnnnnnnnnnnnnnnnnnnnnnnnnnnnnnnnnnnnnnnnnnnnnnnnnnnnnnnnnnnnnnnnnnnnnnnnnnnnnnnnnnnnnnnnnnnnnnnnnnnnnnnnnnnnnnnnnnnnnnnnnnnnnnnnnnnnnnnnnnnnnnnnnnnnnnnnnnnnnnnnnnnnnnnnnnnnnnnnnnnnnnnnnnnnnnnnnnnnnnnnnnnnnnnnnnnnnnnnnnnnnnnnnnnnnnnnnnnnnnnnnnnnnnnnnnnnnnnnnnnnnnnnnnnnnnnnnnnnnnnnnnnnnnnnnnnnnnnnnnnnnnnnnnnnnnnnnnnnnnnnnnnnnnnnnnnnnnnnnnnnnnnnnnnnnnnnnnnnnnnnnnnnnnnnnnnnnnnnnnnnnnnnnnnnnnnnnnnnnnnnnnnnnnnnnnnnnnnnnnnnnnnnnnnnnnnnnnnnnnnnnnnnnnnnnnnnnnnnnnnnnnnnnnnnnnnnnnnnnnnnnnnnnnnnnnnnnnnnnnnnnnnnnnnnnnnnnnnnnnnnnnnnnnnnnnnnnnnnnnnnnnnnnnnnnnnnnnnnnnnnnnnnnnnnnnnnnnnnnnnnnnnnnnnnnnnnnnnnnnnnnnnnnnnnnnnnnnnnnnnnnnnnnnnnnnnnnnnnnnnnnnnnnnnnnnnnnnnnnnnnnnnnnnnnnnnnnnnnnnnnnnnnnnnnnnnnnnnnnnnnnnnnnnnnnnnnnnnnnnnnnnnnnnnnnnnnnnnnnnnnnnnnnnnnnnnnnnnnnnnnnnnnnnnnnnnnnnnnnnnnnnnnnnnnnnnnnnnnnnnnnnnnnnnnnnnnnnnnnnnnnnnnnnnnnnnnnnnnnnnnnnnnnnnnnnnnnnnnnnnnnnnnnnnnnnnnnnnnnnnnnnnnnnnnnnnnnnnnnnnnnnnnnnnnnnnnnnnnnnnnnnnnnnnnnnnnnnnnnnnnnnnnnnnnnnnnnnnnnnnnnnnnnnnnnnnnnnnnnnnnnnnnnnnnnnnnnnnnnnnnnnnnnnnnnnnnnnnnnnnnnnnnnnnnnnnnnnnnnnnnnnnnnnnnnnnnnnnnnnnnnnnnnnnnnnnnnnnnnnnnnnnnnnnnnnnnnnnnnnnnnnnnnnnnnnnnnnnnnnnnnnnnnnnnnnnnnnnnnnnnnnnnnnnnnnnnnnnnnnnnnnnnnnnnnnnnnnnnnnnnnnnnnnnnnnnnnnnnnnnnnnnnnnnnnnnnnnnnnnnnnnnnnnnnnnnnnnnnnnnnnnnnnnnnnnnnnnnnnnnnnnnnnnnnnnnnnnnnnnnnnnnnnnnnnnnnnnnnnnnnnnnnnnnnnnnnnnnnnnnnnnnnnnnnnnnnnnnnnnnnnnnnnnnnnnnnnnnnnnnnnnnnnnnnnnnnnnnnnnnnnnnnnnnnnnnnnnnnnnnnnnnnnnnnnnnnnnnnnnnnnnnnnnnnnnnnnnnnnnnnnnnnnnnnnnnnnnnnnnnnnnnnnnnnnnnnnnnnnnnnnnnnnnnnnnnnnnnnnnnnnnnnnnnnnnnnnnnnnnnnnnnnnnnnnnnnnnnnnnnnnnnnnnnnnnnnnnnnnnnnnnnnnnnnnnnnnnnnnnnnnnnnnnnnnnnnnnnnnnnnnnnnnnnnnnnnnnnnnnnnnnnnnnnnnnnnnnnnnnnnnnnnnnnnnnnnnnnnnnnnnnnnnnnnnnnnnnnnnnnnnnnnnnnnnnnnnnnnnnnnnnnnnnnnnnnnnnnnnnnnnnnnnnnnnnnnnnnnnnnnnnnnnnnnnnnnnnnnnnnnnnnnnnnnnnnnnnnnnnnnnnnnnnnnnnnnnnnnnnnnnnnnnnnnnnnnnnnnnnnnnnnnnnnnnnnnnnnnnnnnnnnnnnnnnnnnnnnnnnnnnnnnnnnnnnnnnnnnnnnnnnnnnnnnnnnnnnnnnnnnnnnnnnnnnnnnnnnnnnnnnnnnnnnnnnnnnnnnnnnnnnnnnnnnnnnnnnnnnnnnnnnnnnnnnnnnnnnnnnnnnnnnnnnnnnnnnnnnnnnnnnnnnnnnnnnnnnnnnnnnnnnnnnnnnnnnnnnnnnnnnnnnnnnnnnnnnnnnnnnnnnnnnnnnnnnnnnnnnnnnnnnnnnnnnnnnnnnnnnnnnnnnnnnnnnnnnnnnnnnnnnnnnnnnnnnnnnnnnnnnnnnnnnnnnnnnnnnnnnnnnnnnnnnnnnnnnnnnnnnnnnnnnnnnnnnnnnnnnnnnnnnnnnnnnnnnnnnnnnnnnnnnnnnnnnnnnnnnnnnnnnnnnnnnnnnnnnnnnnnnnnnnnnnnnnnnnnnnnnnnnnnnnnnnnnnnnnnnnnnnnnnnnnnnnnnnnnnnnnnnnnnnnnnnnnnnnnnnnnnnnnnnnnnnnnnnnnnnnnnnnnnnnnnnnnnnnnnnnnnnnnnnnnnnnnnnnnnnnnnnnnnnnnnnnnnnnnnnnnnnnnnnnnnnnnnnnnnnnnnnnnnnnnnnnnnnnnnnnnnnnnnnnnnnnnnnnnnnnnnnnnnnnnnnnnnnnnnnnnnnnnnnnnnnnnnnnnnnnnnnnnnnnnnnnnnnnnnnnnnnnnnnnnnnnnnnnnnnnnnnnnnnnnnnnnnnnnnnnnnnnnnnnnnnnnnnnnnnnnnnnnnnnnnnnnnnnnnnnnnnnnnnnnnnnnnnnnnnnnnnnnnnnnnnnnnnnnnnnnnnnnnnnnnnnnnnnnnnnnnnnnnnnnnnnnnnnnnnnnnnnnnnnnnnnnnnnnnnnnnnnnnnnnnnnnnnnnnnnnnnnnnnnnnnnnnnnnnnnnnnnnnnnnnnnnnnnnnnnnnnnnnnnnnnnnnnnnnnnnnnnnnnnnnnnnnnnnnnnnnnnnnnnnnnnnnnnnnnnnnnnnnnnnnnnnnnnnnnnnnnnnnnnnnnnnnnnnnnnnnnnnnnnnnnnnnnnnnnnnnnnnnnnnnnnnnnnnnnnnnnnnnnnnnnnnnnnnnnnnnnnnnnnnnnnnnnnnnnnnnnnnnnnnnnnnnnnnnnnnnnnnnnnnnnnnnnnnnnnnnnnnnnnnnnnnnnnnnnnnnnnnnnnnnnnnnnnnnnnnnnnnnnnnnnnnnnnnnnnnnnnnnnnnnnnnnnnnnnnnnnnnnnnnnnnnnnnnnnnnnnnnnnnnnnnnnnnnnnnnnnnnnnnnnnnnnnnnnnnnnnnnnnnnnnnnnnnnnnnnnnnnnnnnnnnnnnnnnnnnnnnnnnnnnnnnnnnnnnnnnnnnnnnnnnnnnnnnnnnnnnnnnnnnnnnnnnnnnnnnnnnnnnnnnnnnnnnnnnnnnnnnnnnnnnnnnnnnnnnnnnnnnnnnnnnnnnnnnnnnnnnnnnnnnnnnnnnnnnnnnnnnnnnnnnnnnnnnnnnnnnnnnnnnnnnnnnnnnnnnnnnnnnnnnnnnnnnnnnnnnnnnnnnnnnnnnnnnnnnnnnnnnnnnnnnnnnnnnnnnnnnnnnnnnnnnnnnnnnnnnnnnnnnnnnnnnnnnnnnnnnnnnnnnnnnnnnnnnnnnnnnnnnnnnnnnnnnnnnnnnnnnnnnnnnnnnnnnnnnnnnnnnnnnnnnnnnnnnnnnnnnnnnnnnnnnnnnnnnnnnnnnnnnnnnnnnnnnnnnnnnnnnnnnnnnnnnnnnnnnnnnnnnnnnnnnnnnnnnnnnnnnnnnnnnnnnnnnnnnnnnnnnnnnnnnnnnnnnnnnnnnnnnnnnnnnnnnnnnnnnnnnnnnnnnnnnnnnnnnnnnnnnnnnnnnnnnnnnnnnnnnnnnnnnnnnnnnnnnnnnnnnnnnnnnnnnnnnnnnnnnnnnnnnnnnnnnnnnnnnnnnnnnnnnnnnnnnnnnnnnnnnnnnnnnnnnnnnnnnnnnnnnnnnnnnnnnnnnnnnnnnnnnnnnnnnnnnnnnnnnnnnnnnnnnnnnnnnnnnnnnnnnnnnnnnnnnnnnnnnnnnnnnnnnnnnnnnnnnnnnnnnnnnnnnnnnnnnnnnnnnnnnnnnnnnnnnnnnnnnnnnnnnnnnnnnnnnnnnnnnnnnnnnnnnnnnnnnnnnnnnnnnnnnnnnnnnnnnnnnnnnnnnnnnnnnnnnnnnnnnnnnnnnnnnnnnnnnnnnnnnnnnnnnnnnnnnnnnnnnnnnnnnnnnnnnnnnnnnnnnnnnnnnnnnnnnnnnnnnnnnnnnnnnnnnnnnnnnnnnnnnnnnnnnnnnnnnnnnnnnnnnnnnnnnnnnnnnnnnnnnnnnnnnnnnnnnnnnnnnnnnnnnnnnnnnnnnnnnnnnnnnnnnnnnnnnnnnnnnnnnnnnnnnnnnnnnnnnnnnnnnnnnnnnnnnnnnnnnnnnnnnnnnnnnnnnnnnnnnnnnnnnnnnnnnnnnnnnnnnnnnnnnnnnnnnnnnnnnnnnnnnnnnnnnnnnnnnnnnnnnnnnnnnnnnnnnnnnnnnnnnnnnnnnnnnnnnnnnnnnnnnnnnnnnnnnnnnnnnnnnnnnnnnnnnnnnnnnnnnnnnnnnnnnnnnnnnnnnnnnnnnnnnnnnnnnnnnnnnnnnnnnnnnnnnnnnnnnnnnnnnnnnnnnnnnnnnnnnnnnnnnnnnnnnnnnnnnnnnnnnnnnnnnnnnnnnnnnnnnnnnnnnnnnnnnnnnnnnnnnnnnnnnnnnnnnnnnnnnnnnnnnnnnnnnnnnnnnnnnnnnnnnnnnnnnnnnnnnnnnnnnnnnnnnnnnnnnnnnnnnnnnnnnnnnnnnnnnnnnnnnnnnnnnnnnnnnnnnnnnnnnnnnnnnnnnnnnnnnnnnnnnnnnnnnnnnnnnnnnnnnnnnnnnnnnnnnnnnnnnnnnnnnnnnnnnnnnnnnnnnnnnnnnnnnnnnnnnnnnnnnnnnnnnnnnnnnnnnnnnnnnnnnnnnnnnnnnnnnnnnnnnnnnnnnnnnnnnnnnnnnnnnnnnnnnnnnnnnnnnnnnnnnnnnnnnnnnnnnnnnnnnnnnnnnnnnnnnnnnnnnnnnnnnnnnnnnnnnnnnnnnnnnnnnnnnnnnnnnnnnnnnnnnnnnnnnnnnnnnnnnnnnnnnnnnnnnnnnnnnnnnnnnnnnnnnnnnnnnnnnnnnnnnnnnnnnnnnnnnnnnnnnnnnnnnnnnnnnnnnnnnnnnnnnnnnnnnnnnnnnnnnnnnnnnnnnnnnnnnnnnnnnnnnnnnnnnnnnnnnnnnnnnnnnnnnnnnnnnnnnnnnnnnnnnnnnnnnnnnnnnnnnnnnnnnnnnnnnnnnnnnnnnnnnnnnnnnnnnnnnnnnnnnnnnnnnnnnnnnnnnnnnnnnnnnnnnnnnnnnnnnnnnnnnnnnnnnnnnnnnnnnnnnnnnnnnnnnnnnnnnnnnnnnnnnnnnnnnnnnnnnnnnnnnnnnnnnnnnnnnnnnnnnnnnnnnnnnnnnnnnnnnnnnnnnnnnnnnnnnnnnnnnnnnnnnnnnnnnnnnnnnnnnnnnnnnnnnnnnnnnnnnnnnnnnnnnnnnnnnnnnnnnnnnnnnnnnnnnnnnnnnnnnnnnnnnnnnnnnnnnnnnnnnnnnnnnnnnnnnnnnnnnnnnnnnnnnnnnnnnnnnnnnnnnnnnnnnnnnnnnnnnnnnnnnnnnnnnnnnnnnnnnnnnnnnnnnnnnnnnnnnnnnnnnnnnnnnnnnnnnnnnnnnnnnnnnnnnnnnnnnnnnnnnnnnnnnnnnnnnnnnnnnnnnnnnnnnnnnnnnnnnnnnnnnnnnnnnnnnnnnnnnnnnnnnnnnnnnnnnnnnnnnnnnnnnnnnnnnnnnnnnnnnnnnnnnnnnnnnnnnnnnnnnnnnnnnnnnnnnnnnnnnnnnnnnnnnnnnnnnnnnnnnnnnnnnnnnnnnnnnnnnnnnnnnnnnnnnnnnnnnnnnnnnnnnnnnnnnnnnnnnnnnnnnnnnnnnnnnnnnnnnnnnnnnnnnnnnnnnnnnnnnnnnnnnnnnnnnnnnnnnnnnnnnnnnnnnnnnnnnnnnnnnnnnnnnnnnnnnnnnnnnnnnnnnnnnnnnnnnnnnnnnnnnnnnnnnnnnnnnnnnnnnnnnnnnnnnnnnnnnnnnnnnnnnnnnnnnnnnnnnnnnnnnnnnnnnnnnnnnnnnnnnnnnnnnnnnnnnnnnnnnnnnnnnnnnnnnnnnnnnnnnnnnnnnnnnnnnnnnnnnnnnnnnnnnnnnnnnnnnnnnnnnnnnnnnnnnnnnnnnnnnnnnnnnnnnnnnnnnnnnnnnnnnnnnnnnnnnnnnnnnnnnnnnnnnnnnnnnnnnnnnnnnnnnnnnnnnnnnnnnnnnnnnnnnnnnnnnnnnnnnnnnnnnnnnnnnnnnnnnnnnnnnnnnnnnnnnnnnnnnnnnnnnnnnnnnnnnnnnnnnnnnnnnnnnnnnnnnnnnnnnnnnnnnnnnnnnnnnnnnnnnnnnnnnnnnnnnnnnnnnnnnnnnnnnnnnnnnnnnnnnnnnnnnnnnnnnnnnnnnnnnnnnnnnnnnnnnnnnnnnnnnnnnnnnnnnnnnnnnnnnnnnnnnnnnnnnnnnnnnnnnnnnnnnnnnnnnnnnnnnnnnnnnnnnnnnnnnnnnnnnnnnnnnnnnnnnnnnnnnnnnnnnnnnnnnnnnnnnnnnnnnnnnnnnnnnnnnnnnnnnnnnnnnnnnnnnnnnnnnnnnnnnnnnnnnnnnnnnnnnnnnnnnnnnnnnnnnnnnnnnnnnnnnnnnnnnnnnnnnnnnnnnnnnnnnnnnnnnnnnnnnnnnnnnnnnnnnnnnnnnnnnnnnnnnnnnnnnnnnnnnnnnnnnnnnnnnnnnnnnnnnnnnnnnnnnnnnnnnnnnnnnnnnnnnnnnnnnnnnnnnnnnnnnnnnnnnnnnnnnnnnnnnnnnnnnnnnnnnnnnnnnnnnnnnnnnnnnnnnnnnnnnnnnnnnnnnnnnnnnnnnnnnnnnnnnnnnnnnnnnnnnnnnnnnnnnnnnnnnnnnnnnnnnnnnnnnnnnnnnnnnnnnnnnnnnnnnnnnnnnnnnnnnnnnnnnnnnnnnnnnnnnnnnnnnnnnnnnnnnnnnnnnnnnnnnnnnnnnnnnnnnnnnnnnnnnnnnnnnnnnnnnnnnnnnnnnnnnnnnnnnnnnnnnnnnnnnnnnnnnnnnnnnnnnnnnnnnnnnnnnnnnnnnnnnnnnnnnnnnnnnnnnnnnnnnnnnnnnnnnnnnnnnnnnnnnnnnnnnnnnnnnnnnnnnnnnnnnnnnnnnnnnnnnnnnnnnnnnnnnnnnnnnnnnnnnnnnnnnnnnnnnnnnnnnnnnnnnnnnnnnnnnnnnnnnnnnnnnnnnnnnnnnnnnnnnnnnnnnnnnnnnnnnnnnnnnnnnnnnnnnnnnnnnnnnnnnnnnnnnnnnnnnnnnnnnnnnnnnnnnnnnnnnnnnnnnnnnnnnnnnnnnnnnnnnnnnnnnnnnnnnnnnnnnnnnnnnnnnnnnnnnnnnnnnnnnnnnnnnnnnnnnnnnnnnnnnnnnnnnnnnnnnnnnnnnnnnnnnnnnnnnnnnnnnnnnnnnnnnnnnnnnnnnnnnnnnnnnnnnnnnnnnnnnnnnnnnnnnnnnnnnnnnnnnnnnnnnnnnnnnnnnnnnnnnnnnnnnnnnnnnnnnnnnnnnnnnnnnnnnnnnnnnnnnnnnnnnnnnnnnnnnnnnnnnnnnnnnnnnnnnnnnnnnnnnnnnnnnnnnnnnnnnnnnnnnnnnnnnnnnnnnnnnnnnnnnnnnnnnnnnnnnnnnnnnnnnnnnnnnnnnnnnnnnnnnnnnnnnnnnnnnnnnnnnnnnnnnnnnnnnnnnnnnnnnnnnnnnnnnnnnnnnnnnnnnnnnnnnnnnnnnnnnnnnnnnnnnnnnnnnnnnnnnnnnnnnnnnnnnnnnnnnnnnnnnnnnnnnnnnnnnnnnnnnnnnnnnnnnnnnnnnnnnnnnnnnnnnnnnnnnnnnnnnnnnnnnnnnnnnnnnnnnnnnnnnnnnnnnnnnnnnnnnnnnnnnnnnnnnnnnnnnnnnnnnnnnnnnnnnnnnnnnnnnnnnnnnnnnnnnnnnnnnnnnnnnnnnnnnnnnnnnnnnnnnnnnnnnnnnnnnnnnnnnnnnnnnnnnnnnnnnnnnnnnnnnnnnnnnnnnnnnnnnnnnnnnnnnnnnnnnnnnnnnnnnnnnnnnnnnnnnnnnnnnnnnnnnnnnnnnnnnnnnnnnnnnnnnnnnnnnnnnnnnnnnnnnnnnnnnnnnnnnnnnnnnnnnnnnnnnnnnnnnnnnnnnnnnnnnnnnnnnnnnnnnnnnnnnnnnnnnnnnnnnnnnnnnnnnnnnnnnnnnnnnnnnnnnnnnnnnnnnnnnnnnnnnnnnnnnnnnnnnnnnnnnnnnnnnnnnnnnnnnnnnnnnnnnnnnnnnnnnnnnnnnnnnnnnnnnnnnnnnnnnnnnnnnnnnnnnnnnnnnnnnnnnnnnnnnnnnnnnnnnnnnnnnnnnnnnnnnnnnnnnnnnnnnnnnnnnnnnnnnnnnnnnnnnnnnnnnnnnnnnnnnnnnnnnnnnnnnnnnnnnnnnnnnnnnnnnnnnnnnnnnnnnnnnnnnnnnnnnnnnnnnnnnnnnnnnnnnnnnnnnnnnnnnnnnnnnnnnnnnnnnnnnnnnnnnnnnnnnnnnnnnnnnnnnnnnnnnnnnnnnnnnnnnnnnnnnnnnnnnnnnnnnnnnnnnnnnnnnnnnnnnnnnnnnnnnnnnnnnnnnnnnnnnnnnnnnnnnnnnnnnnnnnnnnnnnnnnnnnnnnnnnnnnnnnnnnnnnnnnnnnnnnnnnnnnnnnnnnnnnnnnnnnnnnnnnnnnnnnnnnnnnnnnnnnnnnnnnnnnnnnnnnnnnnnnnnnnnnnnnnnnnnnnnnnnnnnnnnnnnnnnnnnnnnnnnnnnnnnnnnnnnnnnnnnnnnnnnnnnnnnnnnnnnnnnnnnnnnnnnnnnnnnnnnnnnnnnnnnnnnnnnnnnnnnnnnnnnnnnnnnnnnnnnnnnnnnnnnnnnnnnnnnnnnnnnnnnnnnnnnnnnnnnnnnnnnnnnnnnnnnnnnnnnnnnnnnnnnnnnnnnnnnnnnnnnnnnnnnnnnnnnnnnnnnnnnnnnnnnnnnnnnnnnnnnnnnnnnnnnnnnnnnnnnnnnnnnnnnnnnnnnnnnnnnnnnnnnnnnnnnnnnnnnnnnnnnnnnnnnnnnnnnnnnnnnnnnnnnnnnnnnnnnnnnnnnnnnnnnnnnnnnnnnnnnnnnnnnnnnnnnnnnnnnnnnnnnnnnnnnnnnnnnnnnnnnnnnnnnnnnnnnnnnnnnnnnnnnnnnnnnnnnnnnnnnnnnnnnnnnnnnnnnnnnnnnnnnnnnnnnnnnnnnnnnnnnnnnnnnnnnnnnnnnnnnnnnnnnnnnnnnnnnnnnnnnnnnnnnnnnnnnnnnnnnnnnnnnnnnnnnnnnnnnnnnnnnnnnnnnnnnnnnnnnnnnnnnnnnnnnnnnnnnnnnnnnnnnnnnnnnnnnnnnnnnnnnnnnnnnnnnnnnnnnnnnnnnnnnnnnnnnnnnnnnnnnnnnnnnnnnnnnnnnnnnnnnnnnnnnnnnnnnnnnnnnnnnnnnnnnnnnnnnnnnnnnnnnnnnnnnnnnnnnnnnnnnnnnnnnnnnnnnnnnnnnnnnnnnnnnnnnnnnnnnnnnnnnnnnnnnnnnnnnnnnnnnnnnnnnnnnnnnnnnnnnnnnnnnnnnnnnnnnnnnnnnnnnnnnnnnnnnnnnnnnnnnnnnnnnnnnnnnnnnnnnnnnnnnnnnnnnnnnnnnnnnnnnnnnnnnnnnnnnnnnnnnnnnnnnnnnnnnnnnnnnnnnnnnnnnnnnnnnnnnnnnnnnnnnnnnnnnnnnnnnnnnnnnnnnnnnnnnnnnnnnnnnnnnnnnnnnnnnnnnnnnnnnnnnnnnnnnnnnnnnnnnnnnnnnnnnnnnnnnnnnnnnnnnnnnnnnnnnnnnnnnnnnnnnnnnnnnnnnnnnnnnnnnnnnnnnnnnnnnnnnnnnnnnnnnnnnnnnnnnnnnnnnnnnnnnnnnnnnnnnnnnnnnnnnnnnnnnnnnnnnnnnnnnnnnnnnnnnnnnnnnnnnnnnnnnnnnnnnnnnnnnnnnnnnnnnnnnnnnnnnnnnnnnnnnnnnnnnnnnnnnnnnnnnnnnnnnnnnnnnnnnnnnnnnnnnnnnnnnnnnnnnnnnnnnnnnnnnnnnnnnnnnnnnnnnnnnnnnnnnnnnnnnnnnnnnnnnnnnnnnnnnnnnnnnnnnnnnnnnnnnnnnnnnnnnnnnnnnnnnnnnnnnnnnnnnnnnnnnnnnnnnnnnnnnnnnnnnnnnnnnnnnnnnnnnnnnnnnnnnnnnnnnnnnnnnnnnnnnnnnnnnnnnnnnnnnnnnnnnnnnnnnnnnnnnnnnnnnnnnnnnnnnnnnnnnnnnnnnnnnnnnnnnnnnnnnnnnnnnnnnnnnnnnnnnnnnnnnnnnnnnnnnnnnnnnnnnnnnnnnnnnnnnnnnnnnnnnnnnnnnnnnnnnnnnnnnnnnnnnnnnnnnnnnnnnnnnnnnnnnnnnnnnnnnnnnnnnnnnnnnnnnnnnnnnnnnnnnnnnnnnnnnnnnnnnnnnnnnnnnnnnnnnnnnnnnnnnnnnnnnnnnnnnnnnnnnnnnnnnnnnnnnnnnnnnnnnnnnnnnnnnnnnnnnnnnnnnnnnnnnnnnnnnnnnnnnnnnnnnnnnnnnnnnnnnnnnnnnnnnnnnnnnnnnnnnnnnnnnnnnnnnnnnnnnnnnnnnnnnnnnnnnnnnnnnnnnnnnnnnnnnnnnnnnnnnnnnnnnnnnnnnnnnnnnnnnnnnnnnnnnnnnnnnnnnnnnnnnnnnnnnnnnnnnnnnnnnnnnnnnnnnnnnnnnnnnnnnnnnnnnnnnnnnnnnnnnnnnnnnnnnnnnnnnnnnnnnnnnnnnnnnnnnnnnnnnnnnnnnnnnnnnnnnnnnnnnnnnnnnnnnnnnnnnnnnnnnnnnnnnnnnnnnnnnnnnnnnnnnnnnnnnnnnnnnnnnnnnnnnnnnnnnnnnnnnnnnnnnnnnnnnnnnnnnnnnnnnnnnnnnnnnnnnnnnnnnnnnnnnnnnnnnnnnnnnnnnnnnnnnnnnnnnnnnnnnnnnnnnnnnnnnnnnnnnnnnnnnnnnnnnnnnnnnnnnnnnnnnnnnnnnnnnnnnnnnnnnnnnnnnnnnnnnnnnnnnnnnnnnnnnnnnnnnnnnnnnnnnnnnnnnnnnnnnnnnnnnnnnnnnnnnnnnnnnnnnnnnnnnnnnnnnnnnnnnnnnnnnnnnnnnnnnnnnnnnnnnnnnnnnnnnnnnnnnnnnnnnnnnnnnnnnnnnnnnnnnnnnnnnnnnnnnnnnnnnnnnnnnnnnnnnnnnnnnnnnnnnnnnnnnnnnnnnnnnnnnnnnnnnnnnnnnnnnnnnnnnnnnnnnnnnnnnnnnnnnnnnnnnnnnnnnnnnnnnnnnnnnnnnnnnnnnnnnnnnnnnnnnnnnnnnnnnnnnnnnnnnnnnnnnnnnnnnnnnnnnnnnnnnnnnnnnnnnnnnnnnnnnnnnnnnnnnnnnnnnnnnnnnnnnnnnnnnnnnnnnnnnnnnnnnnnnnnnnnnnnnnnnnnnnnnnnnnnnnnnnnnnnnnnnnnnnnnnnnnnnnnnnnnnnnnnnnnnnnnnnnnnnnnnnnnnnnnnnnnnnnnnnnnnnnnnnnnnnnnnnnnnnnnnnnnnnnnnnnnnnnnnnnnnnnnnnnnnnnnnnnnnnnnnnnnnnnnnnnnnnnnnnnnnnnnnnnnnnnnnnnnnnnnnnnnnnnnnnnnnnnnnnnnnnnnnnnnnnnnnnnnnnnnnnnnnnnnnnnnnnnnnnnnnnnnnnnnnnnnnnnnnnnnnnnnnnnnnnnnnnnnnnnnnnnnnnnnnnnnnnnnnnnnnnnnnnnnnnnnnnnnnnnnnnnnnnnnnnnnnnnnnnnnnnnnnnnnnnnnnnnnnnnnnnnnnnnnnnnnnnnnnnnnnnnnnnnnnnnnnnnnnnnnnnnnnnnnnnnnnnnnnnnnnnnnnnnnnnnnnnnnnnnnnnnnnnnnnnnnnnnnnnnnnnnnnnnnnnnnnnnnnnnnnnnnnnnnnnnnnnnnnnnnnnnnnnnnnnnnnnnnnnnnnnnnnnnnnnnnnnnnnnnnnnnnnnnnnnnnnnnnnnnnnnnnnnnnnnnnnnnnnnnnnnnnnnnnnnnnnnnnnnnnnnnnnnnnnnnnnnnnnnnnnnnnnnnnnnnnnnnnnnnnnnnnnnnnnnnnnnnnnnnnnnnnnnnnnnnnnnnnnnnnnnnnnnnnnnnnnnnnnnnnnnnnnnnnnnnnnnnnnnnnnnnnnnnnnnnnnnnnnnnnnnnnnnnnnnnnnnnnnnnnnnnnnnnnnnnnnnnnnnnnnnnnnnnnnnnnnnnnnnnnnnnnnnnnnnnnnnnnnnnnnnnnnnnnnnnnnnnnnnnnnnnnnnnnnnnnnnnnnnnnnnnnnnnnnnnnnnnnnnnnnnnnnnnnnnnnnnnnnnnnnnnnnnnnnnnnnnnnnnnnnnnnnnnnnnnnnnnnnnnnnnnnnnnnnnnnnnnnnnnnnnnnnnnnnnnnnnnnnnnnnnnnnnnnnnnnnnnnnnnnnnnnnnnnnnnnnnnnnnnnnnnnnnnnnnnnnnnnnnnnnnnnnnnnnnnnnnnnnnnnnnnnnnnnnnnnnnnnnnnnnnnnnnnnnnnnnnnnnnnnnnnnnnnnnnnnnnnnnnnnnnnnnnnnnnnnnnnnnnnnnnnnnnnnnnnnnnnnnnnnnnnnnnnnnnnnnnnnnnnnnnnnnnnnnnnnnnnnnnnnnnnnnnnnnnnnnnnnnnnnnnnnnnnnnnnnnnnnnnnnnnnnnnnnnnnnnnnnnnnnnnnnnnnnnnnnnnnnnnnnnnnnnnnnnnnnnnnnnnnnnnnnnnnnnnnnnnnnnnnnnnnnnnnnnnnnnnnnnnnnnnnnnnnnnnnnnnnnnnnnnnnnnnnnnnnnnnnnnnnnnnnnnnnnnnnnnnnnnnnnnnnnnnnnnnnnnnnnnnnnnnnnnnnnnnnnnnnnnnnnnnnnnnnnnnnnnnnnnnnnnnnnnnnnnnnnnnnnnnnnnnnnnnnnnnnnnnnnnnnnnnnnnnnnnnnnnnnnnnnnnnnnnnnnnnnnnnnnnnnnnnnnnnnnnnnnnnnnnnnnnnnnnnnnnnnnnnnnnnnnnnnnnnnnnnnnnnnnnnnnnnnnnnnnnnnnnnnnnnnnnnnnnnnnnnnnnnnnnnnnnnnnnnnnnnnnnnnnnnnnnnnnnnnnnnnnnnnnnnnnnnnnnnnnnnnnnnnnnnnnnnnnnnnnnnnnnnnnnnnnnnnnnnnnnnnnnnnnnnnnnnnnnnnnnnnnnnnnnnnnnnnnnnnnnnnnnnnnnnnnnnnnnnnnnnnnnnnnnnnnnnnnnnnnnnnnnnnnnnnnnnnnnnnnnnnnnnnnnnnnnnnnnnnnnnnnnnnnnnnnnnnnnnnnnnnnnnnnnnnnnnnnnnnnnnnnnnnnnnnnnnnnnnnnnnnnnnnnnnnnnnnnnnnnnnnnnnnnnnnnnnnnnnnnnnnnnnnnnnnnnnnnnnnnnnnnnnnnnnnnnnnnnnnnnnnnnnnnnnnnnnnnnnnnnnnnnnnnnnnnnnnnnnnnnnnnnnnnnnnnnnnnnnnnnnnnnnnnnnnnnnnnnnnnnnnnnnnnnnnnnnnnnnnnnnnnnnnnnnnnnnnnnnnnnnnnnnnnnnnnnnnnnnnnnnnnnnnnnnnnnnnnnnnnnnnnnnnnnnnnnnnnnnnnnnnnnnnnnnnnnnnnnnnnnnnnnnnnnnnnnnnnnnnnnnnnnnnnnnnnnnnnnnnnnnnnnnnnnnnnnnnnnnnnnnnnnnnnnnnnnnnnnnnnnnnnnnnnnnnnnnnnnnnnnnnnnnnnnnnnnnnnnnnnnnnnnnnnnnnnnnnnnnnnnnnnnnnnnnnnnnnnnnnnnnnnnnnnnnnnnnnnnnnnnnnnnnnnnnnnnnnnnnnnnnnnnnnnnnnnnnnnnnnnnnnnnnnnnnnnnnnnnnnnnnnnnnnnnnnnnnnnnnnnnnnnnnnnnnnnnnnnnnnnnnnnnnnnnnnnnnnnnnnnnnnnnnnnnnnnnnnnnnnnnnnnnnnnnnnnnnnnnnnnnnnnnnnnnnnnnnnnnnnnnnnnnnnnnnnnnnnnnnnnnnnnnnnnnnnnnnnnnnnnnnnnnnnnnnnnnnnnnnnnnnnnnnnnnnnnnnnnnnnnnnnnnnnnnnnnnnnnnnnnnnnnnnnnnnnnnnnnnnnnnnnnnnnnnnnnnnnnnnnnnnnnnnnnnnnnnnnnnnnnnnnnnnnnnnnnnnnnnnnnnnnnnnnnnnnnnnnnnnnnnnnnnnnnnnnnnnnnnnnnnnnnnnnnnnnnnnnnnnnnnnnnnnnnnnnnnnnnnnnnnnnnnnnnnnnnnnnnnnnnnnnnnnnnnnnnnnnnnnnnnnnnnnnnnnnnnnnnnnnnnnnnnnnnnnnnnnnnnnnnnnnnnnnnnnnnnnnnnnnnnnnnnnnnnnnnnnnnnnnnnnnnnnnnnnnnnnnnnnnnnnnnnnnnnnnnnnnnnnnnnnnnnnnnnnnnnnnnnnnnnnnnnnnnnnnnnnnnnnnnnnnnnnnnnnnnnnnnnnnnnnnnnnnnnnnnnnnnnnnnnnnnnnnnnnnnnnnnnnnnnnnnnnnnnnnnnnnnnnnnnnnnnnnnnnnnnnnnnnnnnnnnnnnnnnnnnnnnnnnnnnnnnnnnnnnnnnnnnnnnnnnnnnnnnnnnnnnnnnnnnnnnnnnnnnnnnnnnnnnnnnnnnnnnnnnnnnnnnnnnnnnnnnnnnnnnnnnnnnnnnnnnnnnnnnnnnnnnnnnnnnnnnnnnnnnnnnnnnnnnnnnnnnnnnnnnnnnnnnnnnnnnnnnnnnnnnnnnnnnnnnnnnnnnnnnnnnnnnnnnnnnnnnnnnnnnnnnnnnnnnnnnnnnnnnnnnnnnnnnnnnnnnnnnnnnnnnnnnnnnnnnnnnnnnnnnnnnnnnnnnnnnnnnnnnnnnnnnnnnnnnnnnnnnnnnnnnnnnnnnnnnnnnnnnnnnnnnnnnnnnnnnnnnnnnnnnnnnnnnnnnnnnnnnnnnnnnnnnnnnnnnnnnnnnnnnnnnnnnnnnnnnnnnnnnnnnnnnnnnnnnnnnnnnnnnnnnnnnnnnnnnnnnnnnnnnnnnnnnnnnnnnnnnnnnnnnnnnnnnnnnnnnnnnnnnnnnnnnnnnnnnnnnnnnnnnnnnnnnnnnnnnnnnnnnnnnnnnnnnnnnnnnnnnnnnnnnnnnnnnnnnnnnnnnnnnnnnnnnnnnnnnnnnnnnnnnnnnnnnnnnnnnnnnnnnnnnnnnnnnnnnnnnnnnnnnnnnnnnnnnnnnnnnnnnnnnnnnnnnnnnnnnnnnnnnnnnnnnnnnnnnnnnnnnnnnnnnnnnnnnnnnnnnnnnnnnnnnnnnnnnnnnnnnnnnnnnnnnnnnnnnnnnnnnnnnnnnnnnnnnnnnnnnnnnnnnnnnnnnnnnnnnnnnnnnnnnnnnnnnnnnnnnnnnnnnnnnnnnnnnnnnnnnnnnnnnnnnnnnnnnnnnnnnnnnnnnnnnnnnnnnnnnnnnnnnnnnnnnnnnnnnnnnnnnnnnnnnnnnnnnnnnnnnnnnnnnnnnnnnnnnnnnnnnnnnnnnnnnnnnnnnnnnnnnnnnnnnnnnnnnnnnnnnnnnnnnnnnnnnnnnnnnnnnnnnnnnnnnnnnnnnnnnnnnnnnnnnnnnnnnnnnnnnnnnnnnnnnnnnnnnnnnnnnnnnnnnnnnnnnnnnnnnnnnnnnnnnnnnnnnnnnnnnnnnnnnnnnnnnnnnnnnnnnnnnnnnnnnnnnnnnnnnnnnnnnnnnnnnnnnnnnnnnnnnnnnnnnnnnnnnnnnnnnnnnnnnnnnnnnnnnnnnnnnnnnnnnnnnnnnnnnnnnnnnnnnnnnnnnnnnnnnnnnnnnnnnnnnnnnnnnnnnnnnnnnnnnnnnnnnnnnnnnnnnnnnnnnnnnnnnnnnnnnnnnnnnnnnnnnnnnnnnnnnnnnnnnnnnnnnnnnnnnnnnnnnnnnnnnnnnnnnnnnnnnnnnnnnnnnnnnnnnnnnnnnnnnnnnnnnnnnnnnnnnnnnnnnnnnnnnnnnnnnnnnnnnnnnnnnnnnnnnnnnnnnnnnnnnnnnnnnnnnnnnnnnnnnnnnnnnnnnnnnnnnnnnnnnnnnnnnnnnnnnnnnnnnnnnnnnnnnnnnnnnnnnnnnnnnnnnnnnnnnnnnnnnnnnnnnnnnnnnnnnnnnnnnnnnnnnnnnnnnnnnnnnnnnnnnnnnnnnnnnnnnnnnnnnnnnnnnnnnnnnnnnnnnnnnnnnnnnnnnnnnnnnnnnnnnnnnnnnnnnnnnnnnnnnnnnnnnnnnnnnnnnnnnnnnnnnnnnnnnnnnnnnnnnnnnnnnnnnnnnnnnnnnnnnnnnnnnnnnnnnnnnnnnnnnnnnnnnnnnnnnnnnnnnnnnnnnnnnnnnnnnnnnnnnnnnnnnnnnnnnnnnnnnnnnnnnnnnnnnnnnnnnnnnnnnnnnnnnnnnnnnnnnnnnnnnnnnnnnnnnnnnnnnnnnnnnnnnnnnnnnnnnnnnnnnnnnnnnnnnnnnnnnnnnnnnnnnnnnnnnnnnnnnnnnnnnnnnnnnnnnnnnnnnnnnnnnnnnnnnnnnnnnnnnnnnnnnnnnnnnnnnnnnnnnnnnnnnnnnnnnnnnnnnnnnnnnnnnnnnnnnnnnnnnnnnnnnnnnnnnnnnnnnnnnnnnnnnnnnnnnnnnnnnnnnnnnnnnnnnnnnnnnnnnnnnnnnnnnnnnnnnnnnnnnnnnnnnnnnnnnnnnnnnnnnnnnnnnnnnnnnnnnnnnnnnnnnnnnnnnnnnnnnnnnnnnnnnnnnnnnnnnnnnnnnnnnnnnnnnnnnnnnnnnnnnnnnnnnnnnnnnnnnnnnnnnnnnnnnnnnnnnnnnnnnnnnnnnnnnnnnnnnnnnnnnnnnnnnnnnnnnnnnnnnnnnnnnnnnnnnnnnnnnnnnnnnnnnnnnnnnnnnnnnnnnnnnnnnnnnnnnnnnnnnnnnnnnnnnnnnnnnnnnnnnnnnnnnnnnnnnnnnnnnnnnnnnnnnnnnnnnnnnnnnnnnnnnnnnnnnnnnnnnnnnnnnnnnnnnnnnnnnnnnnnnnnnnnnnnnnnnnnnnnnnnnnnnnnnnnnnnnnnnnnnnnnnnnnnnnnnnnnnnnnnnnnnnnnnnnnnnnnnnnnnnnnnnnnnnnnnnnnnnnnnnnnnnnnnnnnnnnnnnnnnnnnnnnnnnnnnnnnnnnnnnnnnnnnnnnnnnnnnnnnnnnnnnnnnnnnnnnnnnnnnnnnnnnnnnnnnnnnnnnnnnnnnnnnnnnnnnnnnnnnnnnnnnnnnnnnnnnnnnnnnnnnnnnnnnnnnnnnnnnnnnnnnnnnnnnnnnnnnnnnnnnnnnnnnnnnnnnnnnnnnnnnnnnnnnnnnnnnnnnnnnnnnnnnnnnnnnnnnnnnnnnnnnnnnnnnnnnnnnnnnnnnnnnnnnnnnnnnnnnnnnnnnnnnnnnnnnnnnnnnnnnnnnnnnnnnnnnnnnnnnnnnnnnnnnnnnnnnnnnnnnnnnnnnnnnnnnnnnnnnnnnnnnnnnnnnnnnnnnnnnnnnnnnnnnnnnnnnnnnnnnnnnnnnnnnnnnnnnnnnnnnnnnnnnnnnnnnnnnnnnnnnnnnnnnnnnnnnnnnnnnnnnnnnnnnnnnnnnnnnnnnnnnnnnnnnnnnnnnnnnnnnnnnnnnnnnnnnnnnnnnnnnnnnnnnnnnnnnnnnnnnnnnnnnnnnnnnnnnnnnnnnnnnnnnnnnnnnnnnnnnnnnnnnnnnnnnnnnnnnnnnnnnnnnnnnnnnnnnnnnnnnnnnnnnnnnnnnnnnnnnnnnnnnnnnnnnnnnnnnnnnnnnnnnnnnnnnnnnnnnggtctcnnnnnngagaccnngtc

SEQ ID NO: 23 - DNA, 300041 bp, Artificial Sequence
  source: /note="Description of Artificial Sequence: Synthetic polynucleotide"
  modified_base (11)..(12): a, c, t, or g
  modified_base (20)..(300019): a, c, t, or g
  misc_feature (20)..(300019): /note="This region may encompass 0-300000 nucleotides"
  modified_base (300027)..(300031): a, c, t, or g
  source: /note="See specification as filed for detailed description of substitutions and preferred embodiments"
gaagctcttcnngaagagcnnnnnnnnnnnnnnnnnnnnnnnnnnnnnnnnnnnnnnnnnnnnnnnnnnnnnnnnnnnnnnnnnnnnnnnnnnnnnnnnnnnnnnnnnnnnnnnnnnnnnnnnnnnnnnnnnnnnnnnnnnnnnnnnnnnnnnnnnnnnnnnnnnnnnnnnnnnnnnnnnnnnnnnnnnnnnnnnnnnnnnnnnnnnnnnnnnnnnnnnnnnnnnnnnnnnnnnnnnnnnnnnnnnnnnnnnnnnnnnnnnnnnnnnnnnnnnnnnnnnnnnnnnnnnnnnnnnnnnnnnnnnnnnnnnnnnnnnnnnnnnnnnnnnnnnnnnnnnnnnnnnnnnnnnnnnnnnnnnnnnnnnnnnnnnnnnnnnnnnnnnnnnnnnnnnnnnnnnnnnnnnnnnnnnnnnnnnnnnnnnnnnnnnnnnnnnnnnnnnnnnnnnnnnnnnnnnnnnnnnnnnnnnnnnnnnnnnnnnnnnnnnnnnnnnnnnnnnnnnnnnnnnnnnnnnnnnnnnnnnnnnnnnnnnnnnnnnnnnnnnnnnnnnnnnnnnnnnnnnnnnnnnnnnnnnnnnnnnnnnnnnnnnnnnnnnnnnnnnnnnnnnnnnnnnnnnnnnnnnnnnnnnnnnnnnnnnnnnnnnnnnnnnnnnnnnnnnnnnnnnnnnnnnnnnnnnnnnnnnnnnnnnnnnnnnnnnnnnnnnnnnnnnnnnnnnnnnnnnnnnnnnnnnnnnnnnnnnnnnnnnnnnnnnnnnnnnnnnnnnnnnnnnnnnnnnnnnnnnnnnnnnnnnnnnnnnnnnnnnnnnnnnnnnnnnnnnnnnnnnnnnnnnnnnnnnnnnnnnnnnnnnnnnnnnnnnnnnnnnnnnnnnnnnnnnnnnnnnnnnnnnnnnnnnnnnnnnnnnnnnnnnnnnnnnnnnnnnnnnnnnnnnnnnnnnnnnnnnnnnnnnnnnnnnnnnnnnnnnnnnnnnnnnnnnnnnnnnnnnnnnnnnnnnnnnnnnnnnnnnnnnnnnnnnnnnnnnnnnnnnnnnnnnnnnnnnnnnnnnnnnnnnnnnnnnnnnnnnnnnnnnnnnnnnnnnnnnnnnnnnnnnnnnnnnnnnnnnnnnnnnnnnnnnnnnnnnnnnnnnnnnnnnnnnnnnnnnnnnnnnnnnnnnnnnnnnnnnnnnnnnnnnnnnnnnnnnnnnnnnnnnnnnnnnnnnnnnnnnnnnnnnnnnnnnnnnnnnnnnnnnnnnnnnnnnnnnnnnnnnnnnnnnnnnnnnnnnnnnnnnnnnnnnnnnnnnnnnnnnnnnnnnnnnnnnnnnnnnnnnnnnnnnnnnnnnnnnnnnnnnnnnnnnnnnnnnnnnnnnnnnnnnnnnnnnnnnnnnnnnnnnnnnnnnnnnnnnnnnnnnnnnnnnnnnnnnnnnnnnnnnnnnnnnnnnnnnnnnnnnnnnnnnnnnnnnnnnnnnnnnnnnnnnnnnnnnnnnnnnnnnnnnnnnnnnnnnnnnnnnnnnnnnnnnnnnnnnnnnnnnnnnnnnnnnnnnnnnnnnnnnnnnnnnnnnnnnnnnnnnnnnnnnnnnnnnnnnnnnnnnnnnnnnnnnnnnnnnnnnnnnnnnnnnnnnnnnnnnnnnnnnnnnnnnnnnnnnnnnnnnnnnnnnnnnnnnnnnnnnnnnnnnnnnnnnnnnnnnnnnnnnnnnnnnnnnnnnnnnnnnnnnnnnnnnnnnnnnnnnnnnnnnnnnnnnnnnnnnnnnnnnnnnnnnnnnnnnnnnnnnnnnnnnnnnnnnnnnnnnnnnnnnnnnnnnnnnnnnnnnnnnnnnnnnnnnnnnnnnnnnnnnnnnnnnnnnnnnnnnnnnnnnnnnnnnnnnnnnnnnnnnnnnnnnnnnnnnnnnnnnnnnnnnnnnnnnnnnnnnnnnnnnnnnnnnnnnnnnnnnnnnnnnnnnnnnnnnnnnnnnnnnnnnnnnnnnnnnnnnnnnnnnnnnnnnnnnnnnnnnnnnnnnnnnnnnnnnnnnnnnnnnnnnnnnnnnnnnnnnnnnnnnnnnnnnnnnnnnnnnnnnnnnnnnnnnnnnnnnnnnnnnnnnnnnnnnnnnnnnnnnnnnnnnnnnnnnnnnnnnnnnnnnnnnnnnnnnnnnnnnnnnnnnnnnnnnnnnnnnnnnnnnnnnnnnnnnnnnnnnnnnnnnnnnnnnnnnnnnnnnnnnnnnnnnnnnnnnnnnnnnnnnnnnnnnnnnnnnnnnnnnnnnnnnnnnnnnnnnnnnnnnnnnnnnnnnnnnnnnnnnnnnnnnnnnnnnnnnnnnnnnnnnnnnnnnnnnnnnnnnnnnnnnnnnnnnnnnnnnnnnnnnnnnnnnnnnnnnnnnnnnnnnnnnnnnnnnnnnnnnnnnnnnnnnnnnnnnnnnnnnnnnnnnnnnnnnnnnnnnnnnnnnnnnnnnnnnnnnnnnnnnnnnnnnnnnnnnnnnnnnnnnnnnnnnnnnnnnnnnnnnnnnnnnnnnnnnnnnnnnnnnnnnnnnnnnnnnnnnnnnnnnnnnnnnnnnnnnnnnnnnnnnnnnnnnnnnnnnnnnnnnnnnnnnnnnnnnnnnnnnnnnnnnnnnnnnnnnnnnnnnnnnnnnnnnnnnnnnnnnnnnnnnnnnnnnnnnnnnnnnnnnnnnnnnnnnnnnnnnnnnnnnnnnnnnnnnnnnnnnnnnnnnnnnnnnnnnnnnnnnnnnnnnnnnnnnnnnnnnnnnnnnnnnnnnnnnnnnnnnnnnnnnnnnnnnnnnnnnnnnnnnnnnnnnnnnnnnnnnnnnnnnnnnnnnnnnnnnnnnnnnnnnnnnnnnnnnnnnnnnnnnnnnnnnnnnnnnnnnnnnnnnnnnnnnnnnnnnnnnnnnnnnnnnnnnnnnnnnnnnnnnnnnnnnnnnnnnnnnnnnnnnnnnnnnnnnnnnnnnnnnnnnnnnnnnnnnnnnnnnnnnnnnnnnnnnnnnnnnnnnnnnnnnnnnnnnnnnnnnnnnnnnnnnnnnnnnnnnnnnnnnnnnnnnnnnnnnnnnnnnnnnnnnnnnnnnnnnnnnnnnnnnnnnnnnnnnnnnnnnnnnnnnnnnnnnnnnnnnnnnnnnnnnnnnnnnnnnnnnnnnnnnnnnnnnnnnnnnnnnnnnnnnnnnnnnnnnnnnnnnnnnnnnnnnnnnnnnnnnnnnnnnnnnnnnnnnnnnnnnnnnnnnnnnnnnnnnnnnnnnnnnnnnnnnnnnnnnnnnnnnnnnnnnnnnnnnnnnnnnnnnnnnnnnnnnnnnnnnnnnnnnnnnnnnnnnnnnnnnnnnnnnnnnnnnnnnnnnnnnnnnnnnnnnnnnnnnnnnnnnnnnnnnnnnnnnnnnnnnnnnnnnnnnnnnnnnnnnnnnnnnnnnnnnnnnnnnnnnnnnnnnnnnnnnnnnnnnnnnnnnnnnnnnnnnnnnnnnnnnnnnnnnnnnnnnnnnnnnnnnnnnnnnnnnnnnnnnnnnnnnnnnnnnnnnnnnnnnnnnnnnnnnnnnnnnnnnnnnnnnnnnnnnnnnnnnnnnnnnnnnnnnnnnnnnnnnnnnnnnnnnnnnnnnnnnnnnnnnnnnnnnnnnnnnnnnnnnnnnnnnnnnnnnnnnnnnnnnnnnnnnnnnnnnnnnnnnnnnnnnnnnnnnnnnnnnnnnnnnnnnnnnnnnnnnnnnnnnnnnnnnnnnnnnnnnnnnnnnnnnnnnnnnnnnnnnnnnnnnnnnnnnnnnnnnnnnnnnnnnnnnnnnnnnnnnnnnnnnnnnnnnnnnnnnnnnnnnnnnnnnnnnnnnnnnnnnnnnnnnnnnnnnnnnnnnnnnnnnnnnnnnnnnnnnnnnnnnnnnnnnnnnnnnnnnnnnnnnnnnnnnnnnnnnnnnnnnnnnnnnnnnnnnnnnnnnnnnnnnnnnnnnnnnnnnnnnnnnnnnnnnnnnnnnnnnnnnnnnnnnnnnnnnnnnnnnnnnnnnnnnnnnnnnnnnnnnnnnnnnnnnnnnnnnnnnnnnnnnnnnnnnnnnnnnnnnnnnnnnnnnnnnnnnnnnnnnnnnnnnnnnnnnnnnnnnnnnnnnnnnnnnnnnnnnnnnnnnnnnnnnnnnnnnnnnnnnnnnnnnnnnnnnnnnnnnnnnnnnnnnnnnnnnnnnnnnnnnnnnnnnnnnnnnnnnnnnnnnnnnnnnnnnnnnnnnnnnnnnnnnnnnnnnnnnnnnnnnnnnnnnnnnnnnnnnnnnnnnnnnnnnnnnnnnnnnnnnnnnnnnnnnnnnnnnnnnnnnnnnnnnnnnnnnnnnnnnnnnnnnnnnnnnnnnnnnnnnnnnnnnnnnnnnnnnnnnnnnnnnnnnnnnnnnnnnnnnnnnnnnnnnnnnnnnnnnnnnnnnnnnnnnnnnnnnnnnnnnnnnnnnnnnnnnnnnnnnnnnnnnnnnnnnnnnnnnnnnnnnnnnnnnnnnnnnnnnnnnnnnnnnnnnnnnnnnnnnnnnnnnnnnnnnnnnnnnnnnnnnnnnnnnnnnnnnnnnnnnnnnnnnnnnnnnnnnnnnnnnnnnnnnnnnnnnnnnnnnnnnnnnnnnnnnnnnnnnnnnnnnnnnnnnnnnnnnnnnnnnnnnnnnnnnnnnnnnnnnnnnnnnnnnnnnnnnnnnnnnnnnnnnnnnnnnnnnnnnnnnnnnnnnnnnnnnnnnnnnnnnnnnnnnnnnnnnnnnnnnnnnnnnnnnnnnnnnnnnnnnnnnnnnnnnnnnnnnnnnnnnnnnnnnnnnnnnnnnnnnnnnnnnnnnnnnnnnnnnnnnnnnnnnnnnnnnnnnnnnnnnnnnnnnnnnnnnnnnnnnnnnnnnnnnnnnnnnnnnnnnnnnnnnnnnnnnnnnnnnnnnnnnnnnnnnnnnnnnnnnnnnnnnnnnnnnnnnnnnnnnnnnnnnnnnnnnnnnnnnnnnnnnnnnnnnnnnnnnnnnnnnnnnnnnnnnnnnnnnnnnnnnnnnnnnnnnnnnnnnnnnnnnnnnnnnnnnnnnnnnnnnnnnnnnnnnnnnnnnnnnnnnnnnnnnnnnnnnnnnnnnnnnnnnnnnnnnnnnnnnnnnnnnnnnnnnnnnnnnnnnnnnnnnnnnnnnnnnnnnnnnnnnnnnnnnnnnnnnnnnnnnnnnnnnnnnnnnnnnnnnnnnnnnnnnnnnnnnnnnnnnnnnnnnnnnnnnnnnnnnnnnnnnnnnnnnnnnnnnnnnnnnnnnnnnnnnnnnnnnnnnnnnnnnnnnnnnnnnnnnnnnnnnnnnnnnnnnnnnnnnnnnnnnnnnnnnnnnnnnnnnnnnnnnnnnnnnnnnnnnnnnnnnnnnnnnnnnnnnnnnnnnnnnnnnnnnnnnnnnnnnnnnnnnnnnnnnnnnnnnnnnnnnnnnnnnnnnnnnnnnnnnnnnnnnnnnnnnnnnnnnnnnnnnnnnnnnnnnnnnnnnnnnnnnnnnnnnnnnnnnnnnnnnnnnnnnnnnnnnnnnnnnnnnnnnnnnnnnnnnnnnnnnnnnnnnnnnnnnnnnnnnnnnnnnnnnnnnnnnnnnnnnnnnnnnnnnnnnnnnnnnnnnnnnnnnnnnnnnnnnnnnnnnnnnnnnnnnnnnnnnnnnnnnnnnnnnnnnnnnnnnnnnnnnnnnnnnnnnnnnnnnnnnnnnnnnnnnnnnnnnnnnnnnnnnnnnnnnnnnnnnnnnnnnnnnnnnnnnnnnnnnnnnnnnnnnnnnnnnnnnnnnnnnnnnnnnnnnnnnnnnnnnnnnnnnnnnnnnnnnnnnnnnnnnnnnnnnnnnnnnnnnnnnnnnnnnnnnnnnnnnnnnnnnnnnnnnnnnnnnnnnnnnnnnnnnnnnnnnnnnnnnnnnnnnnnnnnnnnnnnnnnnnnnnnnnnnnnnnnnnnnnnnnnnnnnnnnnnnnnnnnnnnnnnnnnnnnnnnnnnnnnnnnnnnnnnnnnnnnnnnnnnnnnnnnnnnnnnnnnnnnnnnnnnnnnnnnnnnnnnnnnnnnnnnnnnnnnnnnnnnnnnnnnnnnnnnnnnnnnnnnnnnnnnnnnnnnnnnnnnnnnnnnnnnnnnnnnnnnnnnnnnnnnnnnnnnnnnnnnnnnnnnnnnnnnnnnnnnnnnnnnnnnnnnnnnnnnnnnnnnnnnnnnnnnnnnnnnnnnnnnnnnnnnnnnnnnnnnnnnnnnnnnnnnnnnnnnnnnnnnnnnnnnnnnnnnnnnnnnnnnnnnnnnnnnnnnnnnnnnnnnnnnnnnnnnnnnnnnnnnnnnnnnnnnnnnnnnnnnnnnnnnnnnnnnnnnnnnnnnnnnnnnnnnnnnnnnnnnnnnnnnnnnnnnnnnnnnnnnnnnnnnnnnnnnnnnnnnnnnnnnnnnnnnnnnnnnnnnnnnnnnnnnnnnnnnnnnnnnnnnnnnnnnnnnnnnnnnnnnnnnnnnnnnnnnnnnnnnnnnnnnnnnnnnnnnnnnnnnnnnnnnnnnnnnnnnnnnnnnnnnnnnnnnnnnnnnnnnnnnnnnnnnnnnnnnnnnnnnnnnnnnnnnnnnnnnnnnnnnnnnnnnnnnnnnnnnnnnnnnnnnnnnnnnnnnnnnnnnnnnnnnnnnnnnnnnnnnnnnnnnnnnnnnnnnnnnnnnnnnnnnnnnnnnnnnnnnnnnnnnnnnnnnnnnnnnnnnnnnnnnnnnnnnnnnnnnnnnnnnnnnnnnnnnnnnnnnnnnnnnnnnnnnnnnnnnnnnnnnnnnnnnnnnnnnnnnnnnnnnnnnnnnnnnnnnnnnnnnnnnnnnnnnnnnnnnnnnnnnnnnnnnnnnnnnnnnnnnnnnnnnnnnnnnnnnnnnnnnnnnnnnnnnnnnnnnnnnnnnnnnnnnnnnnnnnnnnnnnnnnnnnnnnnnnnnnnnnnnnnnnnnnnnnnnnnnnnnnnnnnnnnnnnnnnnnnnnnnnnnnnnnnnnnnnnnnnnnnnnnnnnnnnnnnnnnnnnnnnnnnnnnnnnnnnnnnnnnnnnnnnnnnnnnnnnnnnnnnnnnnnnnnnnnnnnnnnnnnnnnnnnnnnnnnnnnnnnnnnnnnnnnnnnnnnnnnnnnnnnnnnnnnnnnnnnnnnnnnnnnnnnnnnnnnnnnnnnnnnnnnnnnnnnnnnnnnnnnnnnnnnnnnnnnnnnnnnnnnnnnnnnnnnnnnnnnnnnnnnnnnnnnnnnnnnnnnnnnnnnnnnnnnnnnnnnnnnnnnnnnnnnnnnnnnnnnnnnnnnnnnnnnnnnnnnnnnnnnnnnnnnnnnnnnnnnnnnnnnnnnnnnnnnnnnnnnnnnnnnnnnnnnnnnnnnnnnnnnnnnnnnnnnnnnnnnnnnnnnnnnnnnnnnnnnnnnnnnnnnnnnnnnnnnnnnnnnnnnnnnnnnnnnnnnnnnnnnnnnnnnnnnnnnnnnnnnnnnnnnnnnnnnnnnnnnnnnnnnnnnnnnnnnnnnnnnnnnnnnnnnnnnnnnnnnnnnnnnnnnnnnnnnnnnnnnnnnnnnnnnnnnnnnnnnnnnnnnnnnnnnnnnnnnnnnnnnnnnnnnnnnnnnnnnnnnnnnnnnnnnnnnnnnnnnnnnnnnnnnnnnnnnnnnnnnnnnnnnnnnnnnnnnnnnnnnnnnnnnnnnnnnnnnnnnnnnnnnnnnnnnnnnnnnnnnnnnnnnnnnnnnnnnnnnnnnnnnnnnnnnnnnnnnnnnnnnnnnnnnnnnnnnnnnnnnnnnnnnnnnnnnnnnnnnnnnnnnnnnnnnnnnnnnnnnnnnnnnnnnnnnnnnnnnnnnnnnnnnnnnnnnnnnnnnnnnnnnnnnnnnnnnnnnnnnnnnnnnnnnnnnnnnnnnnnnnnnnnnnnnnnnnnnnnnnnnnnnnnnnnnnnnnnnnnnnnnnnnnnnnnnnnnnnnnnnnnnnnnnnnnnnnnnnnnnnnnnnnnnnnnnnnnnnnnnnnnnnnnnnnnnnnnnnnnnnnnnnnnnnnnnnnnnnnnnnnnnnnnnnnnnnnnnnnnnnnnnnnnnnnnnnnnnnnnnnnnnnnnnnnnnnnnnnnnnnnnnnnnnnnnnnnnnnnnnnnnnnnnnnnnnnnnnnnnnnnnnnnnnnnnnnnnnnnnnnnnnnnnnnnnnnnnnnnnnnnnnnnnnnnnnnnnnnnnnnnnnnnnnnnnnnnnnnnnnnnnnnnnnnnnnnnnnnnnnnnnnnnnnnnnnnnnnnnnnnnnnnnnnnnnnnnnnnnnnnnnnnnnnnnnnnnnnnnnnnnnnnnnnnnnnnnnnnnnnnnnnnnnnnnnnnnnnnnnnnnnnnnnnnnnnnnnnnnnnnnnnnnnnnnnnnnnnnnnnnnnnnnnnnnnnnnnnnnnnnnnnnnnnnnnnnnnnnnnnnnnnnnnnnnnnnnnnnnnnnnnnnnnnnnnnnnnnnnnnnnnnnnnnnnnnnnnnnnnnnnnnnnnnnnnnnnnnnnnnnnnnnnnnnnnnnnnnnnnnnnnnnnnnnnnnnnnnnnnnnnnnnnnnnnnnnnnnnnnnnnnnnnnnnnnnnnnnnnnnnnnnnnnnnnnnnnnnnnnnnnnnnnnnnnnnnnnnnnnnnnnnnnnnnnnnnnnnnnnnnnnnnnnnnnnnnnnnnnnnnnnnnnnnnnnnnnnnnnnnnnnnnnnnnnnnnnnnnnnnnnnnnnnnnnnnnnnnnnnnnnnnnnnnnnnnnnnnnnnnnnnnnnnnnnnnnnnnnnnnnnnnnnnnnnnnnnnnnnnnnnnnnnnnnnnnnnnnnnnnnnnnnnnnnnnnnnnnnnnnnnnnnnnnnnnnnnnnnnnnnnnnnnnnnnnnnnnnnnnnnnnnnnnnnnnnnnnnnnnnnnnnnnnnnnnnnnnnnnnnnnnnnnnnnnnnnnnnnnnnnnnnnnnnnnnnnnnnnnnnnnnnnnnnnnnnnnnnnnnnnnnnnnnnnnnnnnnnnnnnnnnnnnnnnnnnnnnnnnnnnnnnnnnnnnnnnnnnnnnnnnnnnnnnnnnnnnnnnnnnnnnnnnnnnnnnnnnnnnnnnnnnnnnnnnnnnnnnnnnnnnnnnnnnnnnnnnnnnnnnnnnnnnnnnnnnnnnnnnnnnnnnnnnnnnnnnnnnnnnnnnnnnnnnnnnnnnnnnnnnnnnnnnnnnnnnnnnnnnnnnnnnnnnnnnnnnnnnnnnnnnnnnnnnnnnnnnnnnnnnnnnnnnnnnnnnnnnnnnnnnnnnnnnnnnnnnnnnnnnnnnnnnnnnnnnnnnnnnnnnnnnnnnnnnnnnnnnnnnnnnnnnnnnnnnnnnnnnnnnnnnnnnnnnnnnnnnnnnnnnnnnnnnnnnnnnnnnnnnnnnnnnnnnnnnnnnnnnnnnnnnnnnnnnnnnnnnnnnnnnnnnnnnnnnnnnnnnnnnnnnnnnnnnnnnnnnnnnnnnnnnnnnnnnnnnnnnnnnnnnnnnnnnnnnnnnnnnnnnnnnnnnnnnnnnnnnnnnnnnnnnnnnnnnnnnnnnnnnnnnnnnnnnnnnnnnnnnnnnnnnnnnnnnnnnnnnnnnnnnnnnnnnnnnnnnnnnnnnnnnnnnnnnnnnnnnnnnnnnnnnnnnnnnnnnnnnnnnnnnnnnnnnnnnnnnnnnnnnnnnnnnnnnnnnnnnnnnnnnnnnnnnnnnnnnnnnnnnnnnnnnnnnnnnnnnnnnnnnnnnnnnnnnnnnnnnnnnnnnnnnnnnnnnnnnnnnnnnnnnnnnnnnnnnnnnnnnnnnnnnnnnnnnnnnnnnnnnnnnnnnnnnnnnnnnnnnnnnnnnnnnnnnnnnnnnnnnnnnnnnnnnnnnnnnnnnnnnnnnnnnnnnnnnnnnnnnnnnnnnnnnnnnnnnnnnnnnnnnnnnnnnnnnnnnnnnnnnnnnnnnnnnnnnnnnnnnnnnnnnnnnnnnnnnnnnnnnnnnnnnnnnnnnnnnnnnnnnnnnnnnnnnnnnnnnnnnnnnnnnnnnnnnnnnnnnnnnnnnnnnnnnnnnnnnnnnnnnnnnnnnnnnnnnnnnnnnnnnnnnnnnnnnnnnnnnnnnnnnnnnnnnnnnnnnnnnnnnnnnnnnnnnnnnnnnnnnnnnnnnnnnnnnnnnnnnnnnnnnnnnnnnnnnnnnnnnnnnnnnnnnnnnnnnnnnnnnnnnnnnnnnnnnnnnnnnnnnnnnnnnnnnnnnnnnnnnnnnnnnnnnnnnnnnnnnnnnnnnnnnnnnnnnnnnnnnnnnnnnnnnnnnnnnnnnnnnnnnnnnnnnnnnnnnnnnnnnnnnnnnnnnnnnnnnnnnnnnnnnnnnnnnnnnnnnnnnnnnnnnnnnnnnnnnnnnnnnnnnnnnnnnnnnnnnnnnnnnnnnnnnnnnnnnnnnnnnnnnnnnnnnnnnnnnnnnnnnnnnnnnnnnnnnnnnnnnnnnnnnnnnnnnnnnnnnnnnnnnnnnnnnnnnnnnnnnnnnnnnnnnnnnnnnnnnnnnnnnnnnnnnnnnnnnnnnnnnnnnnnnnnnnnnnnnnnnnnnnnnnnnnnnnnnnnnnnnnnnnnnnnnnnnnnnnnnnnnnnnnnnnnnnnnnnnnnnnnnnnnnnnnnnnnnnnnnnnnnnnnnnnnnnnnnnnnnnnnnnnnnnnnnnnnnnnnnnnnnnnnnnnnnnnnnnnnnnnnnnnnnnnnnnnnnnnnnnnnnnnnnnnnnnnnnnnnnnnnnnnnnnnnnnnnnnnnnnnnnnnnnnnnnnnnnnnnnnnnnnnnnnnnnnnnnnnnnnnnnnnnnnnnnnnnnnnnnnnnnnnnnnnnnnnnnnnnnnnnnnnnnnnnnnnnnnnnnnnnnnnnnnnnnnnnnnnnnnnnnnnnnnnnnnnnnnnnnnnnnnnnnnnnnnnnnnnnnnnnnnnnnnnnnnnnnnnnnnnnnnnnnnnnnnnnnnnnnnnnnnnnnnnnnnnnnnnnnnnnnnnnnnnnnnnnnnnnnnnnnnnnnnnnnnnnnnnnnnnnnnnnnnnnnnnnnnnnnnnnnnnnnnnnnnnnnnnnnnnnnnnnnnnnnnnnnnnnnnnnnnnnnnnnnnnnnnnnnnnnnnnnnnnnnnnnnnnnnnnnnnnnnnnnnnnnnnnnnnnnnnnnnnnnnnnnnnnnnnnnnnnnnnnnnnnnnnnnnnnnnnnnnnnnnnnnnnnnnnnnnnnnnnnnnnnnnnnnnnnnnnnnnnnnnnnnnnnnnnnnnnnnnnnnnnnnnnnnnnnnnnnnnnnnnnnnnnnnnnnnnnnnnnnnnnnnnnnnnnnnnnnnnnnnnnnnnnnnnnnnnnnnnnnnnnnnnnnnnnnnnnnnnnnnnnnnnnnnnnnnnnnnnnnnnnnnnnnnnnnnnnnnnnnnnnnnnnnnnnnnnnnnnnnnnnnnnnnnnnnnnnnnnnnnnnnnnnnnnnnnnnnnnnnnnnnnnnnnnnnnnnnnnnnnnnnnnnnnnnnnnnnnnnnnnnnnnnnnnnnnnnnnnnnnnnnnnnnnnnnnnnnnnnnnnnnnnnnnnnnnnnnnnnnnnnnnnnnnnnnnnnnnnnnnnnnnnnnnnnnnnnnnnnnnnnnnnnnnnnnnnnnnnnnnnnnnnnnnnnnnnnnnnnnnnnnnnnnnnnnnnnnnnnnnnnnnnnnnnnnnnnnnnnnnnnnnnnnnnnnnnnnnnnnnnnnnnnnnnnnnnnnnnnnnnnnnnnnnnnnnnnnnnnnnnnnnnnnnnnnnnnnnnnnnnnnnnnnnnnnnnnnnnnnnnnnnnnnnnnnnnnnnnnnnnnnnnnnnnnnnnnnnnnnnnnnnnnnnnnnnnnnnnnnnnnnnnnnnnnnnnnnnnnnnnnnnnnnnnnnnnnnnnnnnnnnnnnnnnnnnnnnnnnnnnnnnnnnnnnnnnnnnnnnnnnnnnnnnnnnnnnnnnnnnnnnnnnnnnnnnnnnnnnnnnnnnnnnnnnnnnnnnnnnnnnnnnnnnnnnnnnnnnnnnnnnnnnnnnnnnnnnnnnnnnnnnnnnnnnnnnnnnnnnnnnnnnnnnnnnnnnnnnnnnnnnnnnnnnnnnnnnnnnnnnnnnnnnnnnnnnnnnnnnnnnnnnnnnnnnnnnnnnnnnnnnnnnnnnnnnnnnnnnnnnnnnnnnnnnnnnnnnnnnnnnnnnnnnnnnnnnnnnnnnnnnnnnnnnnnnnnnnnnnnnnnnnnnnnnnnnnnnnnnnnnnnnnnnnnnnnnnnnnnnnnnnnnnnnnnnnnnnnnnnnnnnnnnnnnnnnnnnnnnnnnnnnnnnnnnnnnnnnnnnnnnnnnnnnnnnnnnnnnnnnnnnnnnnnnnnnnnnnnnnnnnnnnnnnnnnnnnnnnnnnnnnnnnnnnnnnnnnnnnnnnnnnnnnnnnnnnnnnnnnnnnnnnnnnnnnnnnnnnnnnnnnnnnnnnnnnnnnnnnnnnnnnnnnnnnnnnnnnnnnnnnnnnnnnnnnnnnnnnnnnnnnnnnnnnnnnnnnnnnnnnnnnnnnnnnnnnnnnnnnnnnnnnnnnnnnnnnnnnnnnnnnnnnnnnnnnnnnnnnnnnnnnnnnnnnnnnnnnnnnnnnnnnnnnnnnnnnnnnnnnnnnnnnnnnnnnnnnnnnnnnnnnnnnnnnnnnnnnnnnnnnnnnnnnnnnnnnnnnnnnnnnnnnnnnnnnnnnnnnnnnnnnnnnnnnnnnnnnnnnnnnnnnnnnnnnnnnnnnnnnnnnnnnnnnnnnnnnnnnnnnnnnnnnnnnnnnnnnnnnnnnnnnnnnnnnnnnnnnnnnnnnnnnnnnnnnnnnnnnnnnnnnnnnnnnnnnnnnnnnnnnnnnnnnnnnnnnnnnnnnnnnnnnnnnnnnnnnnnnnnnnnnnnnnnnnnnnnnnnnnnnnnnnnnnnnnnnnnnnnnnnnnnnnnnnnnnnnnnnnnnnnnnnnnnnnnnnnnnnnnnnnnnnnnnnnnnnnnnnnnnnnnnnnnnnnnnnnnnnnnnnnnnnnnnnnnnnnnnnnnnnnnnnnnnnnnnnnnnnnnnnnnnnnnnnnnnnnnnnnnnnnnnnnnnnnnnnnnnnnnnnnnnnnnnnnnnnnnnnnnnnnnnnnnnnnnnnnnnnnnnnnnnnnnnnnnnnnnnnnnnnnnnnnnnnnnnnnnnnnnnnnnnnnnnnnnnnnnnnnnnnnnnnnnnnnnnnnnnnnnnnnnnnnnnnnnnnnnnnnnnnnnnnnnnnnnnnnnnnnnnnnnnnnnnnnnnnnnnnnnnnnnnnnnnnnnnnnnnnnnnnnnnnnnnnnnnnnnnnnnnnnnnnnnnnnnnnnnnnnnnnnnnnnnnnnnnnnnnnnnnnnnnnnnnnnnnnnnnnnnnnnnnnnnnnnnnnnnnnnnnnnnnnnnnnnnnnnnnnnnnnnnnnnnnnnnnnnnnnnnnnnnnnnnnnnnnnnnnnnnnnnnnnnnnnnnnnnnnnnnnnnnnnnnnnnnnnnnnnnnnnnnnnnnnnnnnnnnnnnnnnnnnnnnnnnnnnnnnnnnnnnnnnnnnnnnnnnnnnnnnnnnnnnnnnnnnnnnnnnnnnnnnnnnnnnnnnnnnnnnnnnnnnnnnnnnnnnnnnnnnnnnnnnnnnnnnnnnnnnnnnnnnnnnnnnnnnnnnnnnnnnnnnnnnnnnnnnnnnnnnnnnnnnnnnnnnnnnnnnnnnnnnnnnnnnnnnnnnnnnnnnnnnnnnnnnnnnnnnnnnnnnnnnnnnnnnnnnnnnnnnnnnnnnnnnnnnnnnnnnnnnnnnnnnnnnnnnnnnnnnnnnnnnnnnnnnnnnnnnnnnnnnnnnnnnnnnnnnnnnnnnnnnnnnnnnnnnnnnnnnnnnnnnnnnnnnnnnnnnnnnnnnnnnnnnnnnnnnnnnnnnnnnnnnnnnnnnnnnnnnnnnnnnnnnnnnnnnnnnnnnnnnnnnnnnnnnnnnnnnnnnnnnnnnnnnnnnnnnnnnnnnnnnnnnnnnnnnnnnnnnnnnnnnnnnnnnnnnnnnnnnnnnnnnnnnnnnnnnnnnnnnnnnnnnnnnnnnnnnnnnnnnnnnnnnnnnnnnnnnnnnnnnnnnnnnnnnnnnnnnnnnnnnnnnnnnnnnnnnnnnnnnnnnnnnnnnnnnnnnnnnnnnnnnnnnnnnnnnnnnnnnnnnnnnnnnnnnnnnnnnnnnnnnnnnnnnnnnnnnnnnnnnnnnnnnnnnnnnnnnnnnnnnnnnnnnnnnnnnnnnnnnnnnnnnnnnnnnnnnnnnnnnnnnnnnnnnnnnnnnnnnnnnnnnnnnnnnnnnnnnnnnnnnnnnnnnnnnnnnnnnnnnnnnnnnnnnnnnnnnnnnnnnnnnnnnnnnnnnnnnnnnnnnnnnnnnnnnnnnnnnnnnnnnnnnnnnnnnnnnnnnnnnnnnnnnnnnnnnnnnnnnnnnnnnnnnnnnnnnnnnnnnnnnnnnnnnnnnnnnnnnnnnnnnnnnnnnnnnnnnnnnnnnnnnnnnnnnnnnnnnnnnnnnnnnnnnnnnnnnnnnnnnnnnnnnnnnnnnnnnnnnnnnnnnnnnnnnnnnnnnnnnnnnnnnnnnnnnnnnnnnnnnnnnnnnnnnnnnnnnnnnnnnnnnnnnnnnnnnnnnnnnnnnnnnnnnnnnnnnnnnnnnnnnnnnnnnnnnnnnnnnnnnnnnnnnnnnnnnnnnnnnnnnnnnnnnnnnnnnnnnnnnnnnnnnnnnnnnnnnnnnnnnnnnnnnnnnnnnnnnnnnnnnnnnnnnnnnnnnnnnnnnnnnnnnnnnnnnnnnnnnnnnnnnnnnnnnnnnnnnnnnnnnnnnnnnnnnnnnnnnnnnnnnnnnnnnnnnnnnnnnnnnnnnnnnnnnnnnnnnnnnnnnnnnnnnnnnnnnnnnnnnnnnnnnnnnnnnnnnnnnnnnnnnnnnnnnnnnnnnnnnnnnnnnnnnnnnnnnnnnnnnnnnnnnnnnnnnnnnnnnnnnnnnnnnnnnnnnnnnnnnnnnnnnnnnnnnnnnnnnnnnnnnnnnnnnnnnnnnnnnnnnnnnnnnnnnnnnnnnnnnnnnnnnnnnnnnnnnnnnnnnnnnnnnnnnnnnnnnnnnnnnnnnnnnnnnnnnnnnnnnnnnnnnnnnnnnnnnnnnnnnnnnnnnnnnnnnnnnnnnnnnnnnnnnnnnnnnnnnnnnnnnnnnnnnnnnnnnnnnnnnnnnnnnnnnnnnnnnnnnnnnnnnnnnnnnnnnnnnnnnnnnnnnnnnnnnnnnnnnnnnnnnnnnnnnnnnnnnnnnnnnnnnnnnnnnnnnnnnnnnnnnnnnnnnnnnnnnnnnnnnnnnnnnnnnnnnnnnnnnnnnnnnnnnnnnnnnnnnnnnnnnnnnnnnnnnnnnnnnnnnnnnnnnnnnnnnnnnnnnnnnnnnnnnnnnnnnnnnnnnnnnnnnnnnnnnnnnnnnnnnnnnnnnnnnnnnnnnnnnnnnnnnnnnnnnnnnnnnnnnnnnnnnnnnnnnnnnnnnnnnnnnnnnnnnnnnnnnnnnnnnnnnnnnnnnnnnnnnnnnnnnnnnnnnnnnnnnnnnnnnnnnnnnnnnnnnnnnnnnnnnnnnnnnnnnnnnnnnnnnnnnnnnnnnnnnnnnnnnnnnnnnnnnnnnnnnnnnnnnnnnnnnnnnnnnnnnnnnnnnnnnnnnnnnnnnnnnnnnnnnnnnnnnnnnnnnnnnnnnnnnnnnnnnnnnnnnnnnnnnnnnnnnnnnnnnnnnnnnnnnnnnnnnnnnnnnnnnnnnnnnnnnnnnnnnnnnnnnnnnnnnnnnnnnnnnnnnnnnnnnnnnnnnnnnnnnnnnnnnnnnnnnnnnnnnnnnnnnnnnnnnnnnnnnnnnnnnnnnnnnnnnnnnnnnnnnnnnnnnnnnnnnnnnnnnnnnnnnnnnnnnnnnnnnnnnnnnnnnnnnnnnnnnnnnnnnnnnnnnnnnnnnnnnnnnnnnnnnnnnnnnnnnnnnnnnnnnnnnnnnnnnnnnnnnnnnnnnnnnnnnnnnnnnnnnnnnnnnnnnnnnnnnnnnnnnnnnnnnnnnnnnnnnnnnnnnnnnnnnnnnnnnnnnnnnnnnnnnnnnnnnnnnnnnnnnnnnnnnnnnnnnnnnnnnnnnnnnnnnnnnnnnnnnnnnnnnnnnnnnnnnnnnnnnnnnnnnnnnnnnnnnnnnnnnnnnnnnnnnnnnnnnnnnnnnnnnnnnnnnnnnnnnnnnnnnnnnnnnnnnnnnnnnnnnnnnnnnnnnnnnnnnnnnnnnnnnnnnnnnnnnnnnnnnnnnnnnnnnnnnnnnnnnnnnnnnnnnnnnnnnnnnnnnnnnnnnnnnnnnnnnnnnnnnnnnnnnnnnnnnnnnnnnnnnnnnnnnnnnnnnnnnnnnnnnnnnnnnnnnnnnnnnnnnnnnnnnnnnnnnnnnnnnnnnnnnnnnnnnnnnnnnnnnnnnnnnnnnnnnnnnnnnnnnnnnnnnnnnnnnnnnnnnnnnnnnnnnnnnnnnnnnnnnnnnnnnnnnnnnnnnnnnnnnnnnnnnnnnnnnnnnnnnnnnnnnnnnnnnnnnnnnnnnnnnnnnnnnnnnnnnnnnnnnnnnnnnnnnnnnnnnnnnnnnnnnnnnnnnnnnnnnnnnnnnnnnnnnnnnnnnnnnnnnnnnnnnnnnnnnnnnnnnnnnnnnnnnnnnnnnnnnnnnnnnnnnnnnnnnnnnnnnnnnnnnnnnnnnnnnnnnnnnnnnnnnnnnnnnnnnnnnnnnnnnnnnnnnnnnnnnnnnnnnnnnnnnnnnnnnnnnnnnnnnnnnnnnnnnnnnnnnnnnnnnnnnnnnnnnnnnnnnnnnnnnnnnnnnnnnnnnnnnnnnnnnnnnnnnnnnnnnnnnnnnnnnnnnnnnnnnnnnnnnnnnnnnnnnnnnnnnnnnnnnnnnnnnnnnnnnnnnnnnnnnnnnnnnnnnnnnnnnnnnnnnnnnnnnnnnnnnnnnnnnnnnnnnnnnnnnnnnnnnnnnnnnnnnnnnnnnnnnnnnnnnnnnnnnnnnnnnnnnnnnnnnnnnnnnnnnnnnnnnnnnnnnnnnnnnnnnnnnnnnnnnnnnnnnnnnnnnnnnnnnnnnnnnnnnnnnnnnnnnnnnnnnnnnnnnnnnnnnnnnnnnnnnnnnnnnnnnnnnnnnnnnnnnnnnnnnnnnnnnnnnnnnnnnnnnnnnnnnnnnnnnnnnnnnnnnnnnnnnnnnnnnnnnnnnnnnnnnnnnnnnnnnnnnnnnnnnnnnnnnnnnnnnnnnnnnnnnnnnnnnnnnnnnnnnnnnnnnnnnnnnnnnnnnnnnnnnnnnnnnnnnnnnnnnnnnnnnnnnnnnnnnnnnnnnnnnnnnnnnnnnnnnnnnnnnnnnnnnnnnnnnnnnnnnnnnnnnnnnnnnnnnnnnnnnnnnnnnnnnnnnnnnnnnnnnnnnnnnnnnnnnnnnnnnnnnnnnnnnnnnnnnnnnnnnnnnnnnnnnnnnnnnnnnnnnnnnnnnnnnnnnnnnnnnnnnnnnnnnnnnnnnnnnnnnnnnnnnnnnnnnnnnnnnnnnnnnnnnnnnnnnnnnnnnnnnnnnnnnnnnnnnnnnnnnnnnnnnnnnnnnnnnnnnnnnnnnnnnnnnnnnnnnnnnnnnnnnnnnnnnnnnnnnnnnnnnnnnnnnnnnnnnnnnnnnnnnnnnnnnnnnnnnnnnnnnnnnnnnnnnnnnnnnnnnnnnnnnnnnnnnnnnnnnnnnnnnnnnnnnnnnnnnnnnnnnnnnnnnnnnnnnnnnnnnnnnnnnnnnnnnnnnnnnnnnnnnnnnnnnnnnnnnnnnnnnnnnnnnnnnnnnnnnnnnnnnnnnnnnnnnnnnnnnnnnnnnnnnnnnnnnnnnnnnnnnnnnnnnnnnnnnnnnnnnnnnnnnnnnnnnnnnnnnnnnnnnnnnnnnnnnnnnnnnnnnnnnnnnnnnnnnnnnnnnnnnnnnnnnnnnnnnnnnnnnnnnnnnnnnnnnnnnnnnnnnnnnnnnnnnnnnnnnnnnnnnnnnnnnnnnnnnnnnnnnnnnnnnnnnnnnnnnnnnnnnnnnnnnnnnnnnnnnnnnnnnnnnnnnnnnnnnnnnnnnnnnnnnnnnnnnnnnnnnnnnnnnnnnnnnnnnnnnnnnnnnnnnnnnnnnnnnnnnnnnnnnnnnnnnnnnnnnnnnnnnnnnnnnnnnnnnnnnnnnnnnnnnnnnnnnnnnnnnnnnnnnnnnnnnnnnnnnnnnnnnnnnnnnnnnnnnnnnnnnnnnnnnnnnnnnnnnnnnnnnnnnnnnnnnnnnnnnnnnnnnnnnnnnnnnnnnnnnnnnnnnnnnnnnnnnnnnnnnnnnnnnnnnnnnnnnnnnnnnnnnnnnnnnnnnnnnnnnnnnnnnnnnnnnnnnnnnnnnnnnnnnnnnnnnnnnnnnnnnnnnnnnnnnnnnnnnnnnnnnnnnnnnnnnnnnnnnnnnnnnnnnnnnnnnnnnnnnnnnnnnnnnnnnnnnnnnnnnnnnnnnnnnnnnnnnnnnnnnnnnnnnnnnnnnnnnnnnnnnnnnnnnnnnnnnnnnnnnnnnnnnnnnnnnnnnnnnnnnnnnnnnnnnnnnnnnnnnnnnnnnnnnnnnnnnnnnnnnnnnnnnnnnnnnnnnnnnnnnnnnnnnnnnnnnnnnnnnnnnnnnnnnnnnnnnnnnnnnnnnnnnnnnnnnnnnnnnnnnnnnnnnnnnnnnnnnnnnnnnnnnnnnnnnnnnnnnnnnnnnnnnnnnnnnnnnnnnnnnnnnnnnnnnnnnnnnnnnnnnnnnnnnnnnnnnnnnnnnnnnnnnnnnnnnnnnnnnnnnnnnnnnnnnnnnnnnnnnnnnnnnnnnnnnnnnnnnnnnnnnnnnnnnnnnnnnnnnnnnnnnnnnnnnnnnnnnnnnnnnnnnnnnnnnnnnnnnnnnnnnnnnnnnnnnnnnnnnnnnnnnnnnnnnnnnnnnnnnnnnnnnnnnnnnnnnnnnnnnnnnnnnnnnnnnnnnnnnnnnnnnnnnnnnnnnnnnnnnnnnnnnnnnnnnnnnnnnnnnnnnnnnnnnnnnnnnnnnnnnnnnnnnnnnnnnnnnnnnnnnnnnnnnnnnnnnnnnnnnnnnnnnnnnnnnnnnnnnnnnnnnnnnnnnnnnnnnnnnnnnnnnnnnnnnnnnnnnnnnnnnnnnnnnnnnnnnnnnnnnnnnnnnnnnnnnnnnnnnnnnnnnnnnnnnnnnnnnnnnnnnnnnnnnnnnnnnnnnnnnnnnnnnnnnnnnnnnnnnnnnnnnnnnnnnnnnnnnnnnnnnnnnnnnnnnnnnnnnnnnnnnnnnnnnnnnnnnnnnnnnnnnnnnnnnnnnnnnnnnnnnnnnnnnnnnnnnnnnnnnnnnnnnnnnnnnnnnnnnnnnnnnnnnnnnnnnnnnnnnnnnnnnnnnnnnnnnnnnnnnnnnnnnnnnnnnnnnnnnnnnnnnnnnnnnnnnnnnnnnnnnnnnnnnnnnnnnnnnnnnnnnnnnnnnnnnnnnnnnnnnnnnnnnnnnnnnnnnnnnnnnnnnnnnnnnnnnnnnnnnnnnnnnnnnnnnnnnnnnnnnnnnnnnnnnnnnnnnnnnnnnnnnnnnnnnnnnnnnnnnnnnnnnnnnnnnnnnnnnnnnnnnnnnnnnnnnnnnnnnnnnnnnnnnnnnnnnnnnnnnnnnnnnnnnnnnnnnnnnnnnnnnnnnnnnnnnnnnnnnnnnnnnnnnnnnnnnnnnnnnnnnnnnnnnnnnnnnnnnnnnnnnnnnnnnnnnnnnnnnnnnnnnnnnnnnnnnnnnnnnnnnnnnnnnnnnnnnnnnnnnnnnnnnnnnnnnnnnnnnnnnnnnnnnnnnnnnnnnnnnnnnnnnnnnnnnnnnnnnnnnnnnnnnnnnnnnnnnnnnnnnnnnnnnnnnnnnnnnnnnnnnnnnnnnnnnnnnnnnnnnnnnnnnnnnnnnnnnnnnnnnnnnnnnnnnnnnnnnnnnnnnnnnnnnnnnnnnnnnnnnnnnnnnnnnnnnnnnnnnnnnnnnnnnnnnnnnnnnnnnnnnnnnnnnnnnnnnnnnnnnnnnnnnnnnnnnnnnnnnnnnnnnnnnnnnnnnnnnnnnnnnnnnnnnnnnnnnnnnnnnnnnnnnnnnnnnnnnnnnnnnnnnnnnnnnnnnnnnnnnnnnnnnnnnnnnnnnnnnnnnnnnnnnnnnnnnnnnnnnnnnnnnnnnnnnnnnnnnnnnnnnnnnnnnnnnnnnnnnnnnnnnnnnnnnnnnnnnnnnnnnnnnnnnnnnnnnnnnnnnnnnnnnnnnnnnnnnnnnnnnnnnnnnnnnnnnnnnnnnnnnnnnnnnnnnnnnnnnnnnnnnnnnnnnnnnnnnnnnnnnnnnnnnnnnnnnnnnnnnnnnnnnnnnnnnnnnnnnnnnnnnnnnnnnnnnnnnnnnnnnnnnnnnnnnnnnnnnnnnnnnnnnnnnnnnnnnnnnnnnnnnnnnnnnnnnnnnnnnnnnnnnnnnnnnnnnnnnnnnnnnnnnnnnnnnnnnnnnnnnnnnnnnnnnnnnnnnnnnnnnnnnnnnnnnnnnnnnnnnnnnnnnnnnnnnnnnnnnnnnnnnnnnnnnnnnnnnnnnnnnnnnnnnnnnnnnnnnnnnnnnnnnnnnnnnnnnnnnnnnnnnnnnnnnnnnnnnnnnnnnnnnnnnnnnnnnnnnnnnnnnnnnnnnnnnnnnnnnnnnnnnnnnnnnnnnnnnnnnnnnnnnnnnnnnnnnnnnnnnnnnnnnnnnnnnnnnnnnnnnnnnnnnnnnnnnnnnnnnnnnnnnnnnnnnnnnnnnnnnnnnnnnnnnnnnnnnnnnnnnnnnnnnnnnnnnnnnnnnnnnnnnnnnnnnnnnnnnnnnnnnnnnnnnnnnnnnnnnnnnnnnnnnnnnnnnnnnnnnnnnnnnnnnnnnnnnnnnnnnnnnnnnnnnnnnnnnnnnnnnnnnnnnnnnnnnnnnnnnnnnnnnnnnnnnnnnnnnnnnnnnnnnnnnnnnnnnnnnnnnnnnnnnnnnnnnnnnnnnnnnnnnnnnnnnnnnnnnnnnnnnnnnnnnnnnnnnnnnnnnnnnnnnnnnnnnnnnnnnnnnnnnnnnnnnnnnnnnnnnnnnnnnnnnnnnnnnnnnnnnnnnnnnnnnnnnnnnnnnnnnnnnnnnnnnnnnnnnnnnnnnnnnnnnnnnnnnnnnnnnnnnnnnnnnnnnnnnnnnnnnnnnnnnnnnnnnnnnnnnnnnnnnnnnnnnnnnnnnnnnnnnnnnnnnnnnnnnnnnnnnnnnnnnnnnnnnnnnnnnnnnnnnnnnnnnnnnnnnnnnnnnnnnnnnnnnnnnnnnnnnnnnnnnnnnnnnnnnnnnnnnnnnnnnnnnnnnnnnnnnnnnnnnnnnnnnnnnnnnnnnnnnnnnnnnnnnnnnnnnnnnnnnnnnnnnnnnnnnnnnnnnnnnnnnnnnnnnnnnnnnnnnnnnnnnnnnnnnnnnnnnnnnnnnnnnnnnnnnnnnnnnnnnnnnnnnnnnnnnnnnnnnnnnnnnnnnnnnnnnnnnnnnnnnnnnnnnnnnnnnnnnnnnnnnnnnnnnnnnnnnnnnnnnnnnnnnnnnnnnnnnnnnnnnnnnnnnnnnnnnnnnnnnnnnnnnnnnnnnnnnnnnnnnnnnnnnnnnnnnnnnnnnnnnnnnnnnnnnnnnnnnnnnnnnnnnnnnnnnnnnnnnnnnnnnnnnnnnnnnnnnnnnnnnnnnnnnnnnnnnnnnnnnnnnnnnnnnnnnnnnnnnnnnnnnnnnnnnnnnnnnnnnnnnnnnnnnnnnnnnnnnnnnnnnnnnnnnnnnnnnnnnnnnnnnnnnnnnnnnnnnnnnnnnnnnnnnnnnnnnnnnnnnnnnnnnnnnnnnnnnnnnnnnnnnnnnnnnnnnnnnnnnnnnnnnnnnnnnnnnnnnnnnnnnnnnnnnnnnnnnnnnnnnnnnnnnnnnnnnnnnnnnnnnnnnnnnnnnnnnnnnnnnnnnnnnnnnnnnnnnnnnnnnnnnnnnnnnnnnnnnnnnnnnnnnnnnnnnnnnnnnnnnnnnnnnnnnnnnnnnnnnnnnnnnnnnnnnnnnnnnnnnnnnnnnnnnnnnnnnnnnnnnnnnnnnnnnnnnnnnnnnnnnnnnnnnnnnnnnnnnnnnnnnnnnnnnnnnnnnnnnnnnnnnnnnnnnnnnnnnnnnnnnnnnnnnnnnnnnnnnnnnnnnnnnnnnnnnnnnnnnnnnnnnnnnnnnnnnnnnnnnnnnnnnnnnnnnnnnnnnnnnnnnnnnnnnnnnnnnnnnnnnnnnnnnnnnnnnnnnnnnnnnnnnnnnnnnnnnnnnnnnnnnnnnnnnnnnnnnnnnnnnnnnnnnnnnnnnnnnnnnnnnnnnnnnnnnnnnnnnnnnnnnnnnnnnnnnnnnnnnnnnnnnnnnnnnnnnnnnnnnnnnnnnnnnnnnnnnnnnnnnnnnnnnnnnnnnnnnnnnnnnnnnnnnnnnnnnnnnnnnnnnnnnnnnnnnnnnnnnnnnnnnnnnnnnnnnnnnnnnnnnnnnnnnnnnnnnnnnnnnnnnnnnnnnnnnnnnnnnnnnnnnnnnnnnnnnnnnnnnnnnnnnnnnnnnnnnnnnnnnnnnnnnnnnnnnnnnnnnnnnnnnnnnnnnnnnnnnnnnnnnnnnnnnnnnnnnnnnnnnnnnnnnnnnnnnnnnnnnnnnnnnnnnnnnnnnnnnnnnnnnnnnnnnnnnnnnnnnnnnnnnnnnnnnnnnnnnnnnnnnnnnnnnnnnnnnnnnnnnnnnnnnnnnnnnnnnnnnnnnnnnnnnnnnnnnnnnnnnnnnnnnnnnnnnnnnnnnnnnnnnnnnnnnnnnnnnnnnnnnnnnnnnnnnnnnnnnnnnnnnnnnnnnnnnnnnnnnnnnnnnnnnnnnnnnnnnnnnnnnnnnnnnnnnnnnnnnnnnnnnnnnnnnnnnnnnnnnnnnnnnnnnnnnnnnnnnnnnnnnnnnnnnnnnnnnnnnnnnnnnnnnnnnnnnnnnnnnnnnnnnnnnnnnnnnnnnnnnnnnnnnnnnnnnnnnnnnnnnnnnnnnnnnnnnnnnnnnnnnnnnnnnnnnnnnnnnnnnnnnnnnnnnnnnnnnnnnnnnnnnnnnnnnnnnnnnnnnnnnnnnnnnnnnnnnnnnnnnnnnnnnnnnnnnnnnnnnnnnnnnnnnnnnnnnnnnnnnnnnnnnnnnnnnnnnnnnnnnnnnnnnnnnnnnnnnnnnnnnnnnnnnnnnnnnnnnnnnnnnnnnnnnnnnnnnnnnnnnnnnnnnnnnnnnnnnnnnnnnnnnnnnnnnnnnnnnnnnnnnnnnnnnnnnnnnnnnnnnnnnnnnnnnnnnnnnnnnnnnnnnnnnnnnnnnnnnnnnnnnnnnnnnnnnnnnnnnnnnnnnnnnnnnnnnnnnnnnnnnnnnnnnnnnnnnnnnnnnnnnnnnnnnnnnnnnnnnnnnnnnnnnnnnnnnnnnnnnnnnnnnnnnnnnnnnnnnnnnnnnnnnnnnnnnnnnnnnnnnnnnnnnnnnnnnnnnnnnnnnnnnnnnnnnnnnnnnnnnnnnnnnnnnnnnnnnnnnnnnnnnnnnnnnnnnnnnnnnnnnnnnnnnnnnnnnnnnnnnnnnnnnnnnnnnnnnnnnnnnnnnnnnnnnnnnnnnnnnnnnnnnnnnnnnnnnnnnnnnnnnnnnnnnnnnnnnnnnnnnnnnnnnnnnnnnnnnnnnnnnnnnnnnnnnnnnnnnnnnnnnnnnnnnnnnnnnnnnnnnnnnnnnnnnnnnnnnnnnnnnnnnnnnnnnnnnnnnnnnnnnnnnnnnnnnnnnnnnnnnnnnnnnnnnnnnnnnnnnnnnnnnnnnnnnnnnnnnnnnnnnnnnnnnnnnnnnnnnnnnnnnnnnnnnnnnnnnnnnnnnnnnnnnnnnnnnnnnnnnnnnnnnnnnnnnnnnnnnnnnnnnnnnnnnnnnnnnnnnnnnnnnnnnnnnnnnnnnnnnnnnnnnnnnnnnnnnnnnnnnnnnnnnnnnnnnnnnnnnnnnnnnnnnnnnnnnnnnnnnnnnnnnnnnnnnnnnnnnnnnnnnnnnnnnnnnnnnnnnnnnnnnnnnnnnnnnnnnnnnnnnnnnnnnnnnnnnnnnnnnnnnnnnnnnnnnnnnnnnnnnnnnnnnnnnnnnnnnnnnnnnnnnnnnnnnnnnnnnnnnnnnnnnnnnnnnnnnnnnnnnnnnnnnnnnnnnnnnnnnnnnnnnnnnnnnnnnnnnnnnnnnnnnnnnnnnnnnnnnnnnnnnnnnnnnnnnnnnnnnnnnnnnnnnnnnnnnnnnnnnnnnnnnnnnnnnnnnnnnnnnnnnnnnnnnnnnnnnnnnnnnnnnnnnnnnnnnnnnnnnnnnnnnnnnnnnnnnnnnnnnnnnnnnnnnnnnnnnnnnnnnnnnnnnnnnnnnnnnnnnnnnnnnnnnnnnnnnnnnnnnnnnnnnnnnnnnnnnnnnnnnnnnnnnnnnnnnnnnnnnnnnnnnnnnnnnnnnnnnnnnnnnnnnnnnnnnnnnnnnnnnnnnnnnnnnnnnnnnnnnnnnnnnnnnnnnnnnnnnnnnnnnnnnnnnnnnnnnnnnnnnnnnnnnnnnnnnnnnnnnnnnnnnnnnnnnnnnnnnnnnnnnnnnnnnnnnnnnnnnnnnnnnnnnnnnnnnnnnnnnnnnnnnnnnnnnnnnnnnnnnnnnnnnnnnnnnnnnnnnnnnnnnnnnnnnnnnnnnnnnnnnnnnnnnnnnnnnnnnnnnnnnnnnnnnnnnnnnnnnnnnnnnnnnnnnnnnnnnnnnnnnnnnnnnnnnnnnnnnnnnnnnnnnnnnnnnnnnnnnnnnnnnnnnnnnnnnnnnnnnnnnnnnnnnnnnnnnnnnnnnnnnnnnnnnnnnnnnnnnnnnnnnnnnnnnnnnnnnnnnnnnnnnnnnnnnnnnnnnnnnnnnnnnnnnnnnnnnnnnnnnnnnnnnnnnnnnnnnnnnnnnnnnnnnnnnnnnnnnnnnnnnnnnnnnnnnnnnnnnnnnnnnnnnnnnnnnnnnnnnnnnnnnnnnnnnnnnnnnnnnnnnnnnnnnnnnnnnnnnnnnnnnnnnnnnnnnnnnnnnnnnnnnnnnnnnnnnnnnnnnnnnnnnnnnnnnnnnnnnnnnnnnnnnnnnnnnnnnnnnnnnnnnnnnnnnnnnnnnnnnnnnnnnnnnnnnnnnnnnnnnnnnnnnnnnnnnnnnnnnnnnnnnnnnnnnnnnnnnnnnnnnnnnnnnnnnnnnnnnnnnnnnnnnnnnnnnnnnnnnnnnnnnnnnnnnnnnnnnnnnnnnnnnnnnnnnnnnnnnnnnnnnnnnnnnnnnnnnnnnnnnnnnnnnnnnnnnnnnnnnnnnnnnnnnnnnnnnnnnnnnnnnnnnnnnnnnnnnnnnnnnnnnnnnnnnnnnnnnnnnnnnnnnnnnnnnnnnnnnnnnnnnnnnnnnnnnnnnnnnnnnnnnnnnnnnnnnnnnnnnnnnnnnnnnnnnnnnnnnnnnnnnnnnnnnnnnnnnnnnnnnnnnnnnnnnnnnnnnnnnnnnnnnnnnnnnnnnnnnnnnnnnnnnnnnnnnnnnnnnnnnnnnnnnnnnnnnnnnnnnnnnnnnnnnnnnnnnnnnnnnnnnnnnnnnnnnnnnnnnnnnnnnnnnnnnnnnnnnnnnnnnnnnnnnnnnnnnnnnnnnnnnnnnnnnnnnnnnnnnnnnnnnnnnnnnnnnnnnnnnnnnnnnnnnnnnnnnnnnnnnnnnnnnnnnnnnnnnnnnnnnnnnnnnnnnnnnnnnnnnnnnnnnnnnnnnnnnnnnnnnnnnnnnnnnnnnnnnnnnnnnnnnnnnnnnnnnnnnnnnnnnnnnnnnnnnnnnnnnnnnnnnnnnnnnnnnnnnnnnnnnnnnnnnnnnnnnnnnnnnnnnnnnnnnnnnnnnnnnnnnnnnnnnnnnnnnnnnnnnnnnnnnnnnnnnnnnnnnnnnnnnnnnnnnnnnnnnnnnnnnnnnnnnnnnnnnnnnnnnnnnnnnnnnnnnnnnnnnnnnnnnnnnnnnnnnnnnnnnnnnnnnnnnnnnnnnnnnnnnnnnnnnnnnnnnnnnnnnnnnnnnnnnnnnnnnnnnnnnnnnnnnnnnnnnnnnnnnnnnnnnnnnnnnnnnnnnnnnnnnnnnnnnnnnnnnnnnnnnnnnnnnnnnnnnnnnnnnnnnnnnnnnnnnnnnnnnnnnnnnnnnnnnnnnnnnnnnnnnnnnnnnnnnnnnnnnnnnnnnnnnnnnnnnnnnnnnnnnnnnnnnnnnnnnnnnnnnnnnnnnnnnnnnnnnnnnnnnnnnnnnnnnnnnnnnnnnnnnnnnnnnnnnnnnnnnnnnnnnnnnnnnnnnnnnnnnnnnnnnnnnnnnnnnnnnnnnnnnnnnnnnnnnnnnnnnnnnnnnnnnnnnnnnnnnnnnnnnnnnnnnnnnnnnnnnnnnnnnnnnnnnnnnnnnnnnnnnnnnnnnnnnnnnnnnnnnnnnnnnnnnnnnnnnnnnnnnnnnnnnnnnnnnnnnnnnnnnnnnnnnnnnnnnnnnnnnnnnnnnnnnnnnnnnnnnnnnnnnnnnnnnnnnnnnnnnnnnnnnnnnnnnnnnnnnnnnnnnnnnnnnnnnnnnnnnnnnnnnnnnnnnnnnnnnnnnnnnnnnnnnnnnnnnnnnnnnnnnnnnnnnnnnnnnnnnnnnnnnnnnnnnnnnnnnnnnnnnnnnnnnnnnnnnnnnnnnnnnnnnnnnnnnnnnnnnnnnnnnnnnnnnnnnnnnnnnnnnnnnnnnnnnnnnnnnnnnnnnnnnnnnnnnnnnnnnnnnnnnnnnnnnnnnnnnnnnnnnnnnnnnnnnnnnnnnnnnnnnnnnnnnnnnnnnnnnnnnnnnnnnnnnnnnnnnnnnnnnnnnnnnnnnnnnnnnnnnnnnnnnnnnnnnnnnnnnnnnnnnnnnnnnnnnnnnnnnnnnnnnnnnnnnnnnnnnnnnnnnnnnnnnnnnnnnnnnnnnnnnnnnnnnnnnnnnnnnnnnnnnnnnnnnnnnnnnnnnnnnnnnnnnnnnnnnnnnnnnnnnnnnnnnnnnnnnnnnnnnnnnnnnnnnnnnnnnnnnnnnnnnnnnnnnnnnnnnnnnnnnnnnnnnnnnnnnnnnnnnnnnnnnnnnnnnnnnnnnnnnnnnnnnnnnnnnnnnnnnnnnnnnnnnnnnnnnnnnnnnnnnnnnnnnnnnnnnnnnnnnnnnnnnnnnnnnnnnnnnnnnnnnnnnnnnnnnnnnnnnnnnnnnnnnnnnnnnnnnnnnnnnnnnnnnnnnnnnnnnnnnnnnnnnnnnnnnnnnnnnnnnnnnnnnnnnnnnnnnnnnnnnnnnnnnnnnnnnnnnnnnnnnnnnnnnnnnnnnnnnnnnnnnnnnnnnnnnnnnnnnnnnnnnnnnnnnnnnnnnnnnnnnnnnnnnnnnnnnnnnnnnnnnnnnnnnnnnnnnnnnnnnnnnnnnnnnnnnnnnnnnnnnnnnnnnnnnnnnnnnnnnnnnnnnnnnnnnnnnnnnnnnnnnnnnnnnnnnnnnnnnnnnnnnnnnnnnnnnnnnnnnnnnnnnnnnnnnnnnnnnnnnnnnnnnnnnnnnnnnnnnnnnnnnnnnnnnnnnnnnnnnnnnnnnnnnnnnnnnnnnnnnnnnnnnnnnnnnnnnnnnnnnnnnnnnnnnnnnnnnnnnnnnnnnnnnnnnnnnnnnnnnnnnnnnnnnnnnnnnnnnnnnnnnnnnnnnnnnnnnnnnnnnnnnnnnnnnnnnnnnnnnnnnnnnnnnnnnnnnnnnnnnnnnnnnnnnnnnnnnnnnnnnnnnnnnnnnnnnnnnnnnnnnnnnnnnnnnnnnnnnnnnnnnnnnnnnnnnnnnnnnnnnnnnnnnnnnnnnnnnnnnnnnnnnnnnnnnnnnnnnnnnnnnnnnnnnnnnnnnnnnnnnnnnnnnnnnnnnnnnnnnnnnnnnnnnnnnnnnnnnnnnnnnnnnnnnnnnnnnnnnnnnnnnnnnnnnnnnnnnnnnnnnnnnnnnnnnnnnnnnnnnnnnnnnnnnnnnnnnnnnnnnnnnnnnnnnnnnnnnnnnnnnnnnnnnnnnnnnnnnnnnnnnnnnnnnnnnnnnnnnnnnnnnnnnnnnnnnnnnnnnnnnnnnnnnnnnnnnnnnnnnnnnnnnnnnnnnnnnnnnnnnnnnnnnnnnnnnnnnnnnnnnnnnnnnnnnnnnnnnnnnnnnnnnnnnnnnnnnnnnnnnnnnnnnnnnnnnnnnnnnnnnnnnnnnnnnnnnnnnnnnnnnnnnnnnnnnnnnnnnnnnnnnnnnnnnnnnnnnnnnnnnnnnnnnnnnnnnnnnnnnnnnnnnnnnnnnnnnnnnnnnnnnnnnnnnnnnnnnnnnnnnnnnnnnnnnnnnnnnnnnnnnnnnnnnnnnnnnnnnnnnnnnnnnnnnnnnnnnnnnnnnnnnnnnnnnnnnnnnnnnnnnnnnnnnnnnnnnnnnnnnnnnnnnnnnnnnnnnnnnnnnnnnnnnnnnnnnnnnnnnnnnnnnnnnnnnnnnnnnnnnnnnnnnnnnnnnnnnnnnnnnnnnnnnnnnnnnnnnnnnnnnnnnnnnnnnnnnnnnnnnnnnnnnnnnnnnnnnnnnnnnnnnnnnnnnnnnnnnnnnnnnnnnnnnnnnnnnnnnnnnnnnnnnnnnnnnnnnnnnnnnnnnnnnnnnnnnnnnnnnnnnnnnnnnnnnnnnnnnnnnnnnnnnnnnnnnnnnnnnnnnnnnnnnnnnnnnnnnnnnnnnnnnnnnnnnnnnnnnnnnnnnnnnnnnnnnnnnnnnnnnnnnnnnnnnnnnnnnnnnnnnnnnnnnnnnnnnnnnnnnnnnnnnnnnnnnnnnnnnnnnnnnnnnnnnnnnnnnnnnnnnnnnnnnnnnnnnnnnnnnnnnnnnnnnnnnnnnnnnnnnnnnnnnnnnnnnnnnnnnnnnnnnnnnnnnnnnnnnnnnnnnnnnnnnnnnnnnnnnnnnnnnnnnnnnnnnnnnnnnnnnnnnnnnnnnnnnnnnnnnnnnnnnnnnnnnnnnnnnnnnnnnnnnnnnnnnnnnnnnnnnnnnnnnnnnnnnnnnnnnnnnnnnnnnnnnnnnnnnnnnnnnnnnnnnnnnnnnnnnnnnnnnnnnnnnnnnnnnnnnnnnnnnnnnnnnnnnnnnnnnnnnnnnnnnnnnnnnnnnnnnnnnnnnnnnnnnnnnnnnnnnnnnnnnnnnnnnnnnnnnnnnnnnnnnnnnnnnnnnnnnnnnnnnnnnnnnnnnnnnnnnnnnnnnnnnnnnnnnnnnnnnnnnnnnnnnnnnnnnnnnnnnnnnnnnnnnnnnnnnnnnnnnnnnnnnnnnnnnnnnnnnnnnnnnnnnnnnnnnnnnnnnnnnnnnnnnnnnnnnnnnnnnnnnnnnnnnnnnnnnnnnnnnnnnnnnnnnnnnnnnnnnnnnnnnnnnnnnnnnnnnnnnnnnnnnnnnnnnnnnnnnnnnnnnnnnnnnnnnnnnnnnnnnnnnnnnnnnnnnnnnnnnnnnnnnnnnnnnnnnnnnnnnnnnnnnnnnnnnnnnnnnnnnnnnnnnnnnnnnnnnnnnnnnnnnnnnnnnnnnnnnnnnnnnnnnnnnnnnnnnnnnnnnnnnnnnnnnnnnnnnnnnnnnnnnnnnnnnnnnnnnnnnnnnnnnnnnnnnnnnnnnnnnnnnnnnnnnnnnnnnnnnnnnnnnnnnnnnnnnnnnnnnnnnnnnnnnnnnnnnnnnnnnnnnnnnnnnnnnnnnnnnnnnnnnnnnnnnnnnnnnnnnnnnnnnnnnnnnnnnnnnnnnnnnnnnnnnnnnnnnnnnnnnnnnnnnnnnnnnnnnnnnnnnnnnnnnnnnnnnnnnnnnnnnnnnnnnnnnnnnnnnnnnnnnnnnnnnnnnnnnnnnnnnnnnnnnnnnnnnnnnnnnnnnnnnnnnnnnnnnnnnnnnnnnnnnnnnnnnnnnnnnnnnnnnnnnnnnnnnnnnnnnnnnnnnnnnnnnnnnnnnnnnnnnnnnnnnnnnnnnnnnnnnnnnnnnnnnnnnnnnnnnnnnnnnnnnnnnnnnnnnnnnnnnnnnnnnnnnnnnnnnnnnnnnnnnnnnnnnnnnnnnnnnnnnnnnnnnnnnnnnnnnnnnnnnnnnnnnnnnnnnnnnnnnnnnnnnnnnnnnnnnnnnnnnnnnnnnnnnnnnnnnnnnnnnnnnnnnnnnnnnnnnnnnnnnnnnnnnnnnnnnnnnnnnnnnnnnnnnnnnnnnnnnnnnnnnnnnnnnnnnnnnnnnnnnnnnnnnnnnnnnnnnnnnnnnnnnnnnnnnnnnnnnnnnnnnnnnnnnnnnnnnnnnnnnnnnnnnnnnnnnnnnnnnnnnnnnnnnnnnnnnnnnnnnnnnnnnnnnnnnnnnnnnnnnnnnnnnnnnnnnnnnnnnnnnnnnnnnnnnnnnnnnnnnnnnnnnnnnnnnnnnnnnnnnnnnnnnnnnnnnnnnnnnnnnnnnnnnnnnnnnnnnnnnnnnnnnnnnnnnnnnnnnnnnnnnnnnnnnnnnnnnnnnnnnnnnnnnnnnnnnnnnnnnnnnnnnnnnnnnnnnnnnnnnnnnnnnnnnnnnnnnnnnnnnnnnnnnnnnnnnnnnnnnnnnnnnnnnnnnnnnnnnnnnnnnnnnnnnnnnnnnnnnnnnnnnnnnnnnnnnnnnnnnnnnnnnnnnnnnnnnnnnnnnnnnnnnnnnnnnnnnnnnnnnnnnnnnnnnnnnnnnnnnnnnnnnnnnnnnnnnnnnnnnnnnnnnnnnnnnnnnnnnnnnnnnnnnnnnnnnnnnnnnnnnnnnnnnnnnnnnnnnnnnnnnnnnnnnnnnnnnnnnnnnnnnnnnnnnnnnnnnnnnnnnnnnnnnnnnnnnnnnnnnnnnnnnnnnnnnnnnnnnnnnnnnnnnnnnnnnnnnnnnnnnnnnnnnnnnnnnnnnnnnnnnnnnnnnnnnnnnnnnnnnnnnnnnnnnnnnnnnnnnnnnnnnnnnnnnnnnnnnnnnnnnnnnnnnnnnnnnnnnnnnnnnnnnnnnnnnnnnnnnnnnnnnnnnnnnnnnnnnnnnnnnnnnnnnnnnnnnnnnnnnnnnnnnnnnnnnnnnnnnnnnnnnnnnnnnnnnnnnnnnnnnnnnnnnnnnnnnnnnnnnnnnnnnnnnnnnnnnnnnnnnnnnnnnnnnnnnnnnnnnnnnnnnnnnnnnnnnnnnnnnnnnnnnnnnnnnnnnnnnnnnnnnnnnnnnnnnnnnnnnnnnnnnnnnnnnnnnnnnnnnnnnnnnnnnnnnnnnnnnnnnnnnnnnnnnnnnnnnnnnnnnnnnnnnnnnnnnnnnnnnnnnnnnnnnnnnnnnnnnnnnnnnnnnnnnnnnnnnnnnnnnnnnnnnnnnnnnnnnnnnnnnnnnnnnnnnnnnnnnnnnnnnnnnnnnnnnnnnnnnnnnnnnnnnnnnnnnnnnnnnnnnnnnnnnnnnnnnnnnnnnnnnnnnnnnnnnnnnnnnnnnnnnnnnnnnnnnnnnnnnnnnnnnnnnnnnnnnnnnnnnnnnnnnnnnnnnnnnnnnnnnnnnnnnnnnnnnnnnnnnnnnnnnnnnnnnnnnnnnnnnnnnnnnnnnnnnnnnnnnnnnnnnnnnnnnnnnnnnnnnnnnnnnnnnnnnnnnnnnnnnnnnnnnnnnnnnnnnnnnnnnnnnnnnnnnnnnnnnnnnnnnnnnnnnnnnnnnnnnnnnnnnnnnnnnnnnnnnnnnnnnnnnnnnnnnnnnnnnnnnnnnnnnnnnnnnnnnnnnnnnnnnnnnnnnnnnnnnnnnnnnnnnnnnnnnnnnnnnnnnnnnnnnnnnnnnnnnnnnnnnnnnnnnnnnnnnnnnnnnnnnnnnnnnnnnnnnnnnnnnnnnnnnnnnnnnnnnnnnnnnnnnnnnnnnnnnnnnnnnnnnnnnnnnnnnnnnnnnnnnnnnnnnnnnnnnnnnnnnnnnnnnnnnnnnnnnnnnnnnnnnnnnnnnnnnnnnnnnnnnnnnnnnnnnnnnnnnnnnnnnnnnnnnnnnnnnnnnnnnnnnnnnnnnnnnnnnnnnnnnnnnnnnnnnnnnnnnnnnnnnnnnnnnnnnnnnnnnnnnnnnnnnnnnnnnnnnnnnnnnnnnnnnnnnnnnnnnnnnnnnnnnnnnnnnnnnnnnnnnnnnnnnnnnnnnnnnnnnnnnnnnnnnnnnnnnnnnnnnnnnnnnnnnnnnnnnnnnnnnnnnnnnnnnnnnnnnnnnnnnnnnnnnnnnnnnnnnnnnnnnnnnnnnnnnnnnnnnnnnnnnnnnnnnnnnnnnnnnnnnnnnnnnnnnnnnnnnnnnnnnnnnnnnnnnnnnnnnnnnnnnnnnnnnnnnnnnnnnnnnnnnnnnnnnnnnnnnnnnnnnnnnnnnnnnnnnnnnnnnnnnnnnnnnnnnnnnnnnnnnnnnnnnnnnnnnnnnnnnnnnnnnnnnnnnnnnnnnnnnnnnnnnnnnnnnnnnnnnnnnnnnnnnnnnnnnnnnnnnnnnnnnnnnnnnnnnnnnnnnnnnnnnnnnnnnnnnnnnnnnnnnnnnnnnnnnnnnnnnnnnnnnnnnnnnnnnnnnnnnnnnnnnnnnnnnnnnnnnnnnnnnnnnnnnnnnnnnnnnnnnnnnnnnnnnnnnnnnnnnnnnnnnnnnnnnnnnnnnnnnnnnnnnnnnnnnnnnnnnnnnnnnnnnnnnnnnnnnnnnnnnnnnnnnnnnnnnnnnnnnnnnnnnnnnnnnnnnnnnnnnnnnnnnnnnnnnnnnnnnnnnnnnnnnnnnnnnnnnnnnnnnnnnnnnnnnnnnnnnnnnnnnnnnnnnnnnnnnnnnnnnnnnnnnnnnnnnnnnnnnnnnnnnnnnnnnnnnnnnnnnnnnnnnnnnnnnnnnnnnnnnnnnnnnnnnnnnnnnnnnnnnnnnnnnnnnnnnnnnnnnnnnnnnnnnnnnnnnnnnnnnnnnnnnnnnnnnnnnnnnnnnnnnnnnnnnnnnnnnnnnnnnnnnnnnnnnnnnnnnnnnnnnnnnnnnnnnnnnnnnnnnnnnnnnnnnnnnnnnnnnnnnnnnnnnnnnnnnnnnnnnnnnnnnnnnnnnnnnnnnnnnnnnnnnnnnnnnnnnnnnnnnnnnnnnnnnnnnnnnnnnnnnnnnnnnnnnnnnnnnnnnnnnnnnnnnnnnnnnnnnnnnnnnnnnnnnnnnnnnnnnnnnnnnnnnnnnnnnnnnnnnnnnnnnnnnnnnnnnnnnnnnnnnnnnnnnnnnnnnnnnnnnnnnnnnnnnnnnnnnnnnnnnnnnnnnnnnnnnnnnnnnnnnnnnnnnnnnnnnnnnnnnnnnnnnnnnnnnnnnnnnnnnnnnnnnnnnnnnnnnnnnnnnnnnnnnnnnnnnnnnnnnnnnnnnnnnnnnnnnnnnnnnnnnnnnnnnnnnnnnnnnnnnnnnnnnnnnnnnnnnnnnnnnnnnnnnnnnnnnnnnnnnnnnnnnnnnnnnnnnnnnnnnnnnnnnnnnnnnnnnnnnnnnnnnnnnnnnnnnnnnnnnnnnnnnnnnnnnnnnnnnnnnnnnnnnnnnnnnnnnnnnnnnnnnnnnnnnnnnnnnnnnnnnnnnnnnnnnnnnnnnnnnnnnnnnnnnnnnnnnnnnnnnnnnnnnnnnnnnnnnnnnnnnnnnnnnnnnnnnnnnnnnnnnnnnnnnnnnnnnnnnnnnnnnnnnnnnnnnnnnnnnnnnnnnnnnnnnnnnnnnnnnnnnnnnnnnnnnnnnnnnnnnnnnnnnnnnnnnnnnnnnnnnnnnnnnnnnnnnnnnnnnnnnnnnnnnnnnnnnnnnnnnnnnnnnnnnnnnnnnnnnnnnnnnnnnnnnnnnnnnnnnnnnnnnnnnnnnnnnnnnnnnnnnnnnnnnnnnnnnnnnnnnnnnnnnnnnnnnnnnnnnnnnnnnnnnnnnnnnnnnnnnnnnnnnnnnnnnnnnnnnnnnnnnnnnnnnnnnnnnnnnnnnnnnnnnnnnnnnnnnnnnnnnnnnnnnnnnnnnnnnnnnnnnnnnnnnnnnnnnnnnnnnnnnnnnnnnnnnnnnnnnnnnnnnnnnnnnnnnnnnnnnnnnnnnnnnnnnnnnnnnnnnnnnnnnnnnnnnnnnnnnnnnnnnnnnnnnnnnnnnnnnnnnnnnnnnnnnnnnnnnnnnnnnnnnnnnnnnnnnnnnnnnnnnnnnnnnnnnnnnnnnnnnnnnnnnnnnnnnnnnnnnnnnnnnnnnnnnnnnnnnnnnnnnnnnnnnnnnnnnnnnnnnnnnnnnnnnnnnnnnnnnnnnnnnnnnnnnnnnnnnnnnnnnnnnnnnnnnnnnnnnnnnnnnnnnnnnnnnnnnnnnnnnnnnnnnnnnnnnnnnnnnnnnnnnnnnnnnnnnnnnnnnnnnnnnnnnnnnnnnnnnnnnnnnnnnnnnnnnnnnnnnnnnnnnnnnnnnnnnnnnnnnnnnnnnnnnnnnnnnnnnnnnnnnnnnnnnnnnnnnnnnnnnnnnnnnnnnnnnnnnnnnnnnnnnnnnnnnnnnnnnnnnnnnnnnnnnnnnnnnnnnnnnnnnnnnnnnnnnnnnnnnnnnnnnnnnnnnnnnnnnnnnnnnnnnnnnnnnnnnnnnnnnnnnnnnnnnnnnnnnnnnnnnnnnnnnnnnnnnnnnnnnnnnnnnnnnnnnnnnnnnnnnnnnnnnnnnnnnnnnnnnnnnnnnnnnnnnnnnnnnnnnnnnnnnnnnnnnnnnnnnnnnnnnnnnnnnnnnnnnnnnnnnnnnnnnnnnnnnnnnnnnnnnnnnnnnnnnnnnnnnnnnnnnnnnnnnnnnnnnnnnnnnnnnnnnnnnnnnnnnnnnnnnnnnnnnnnnnnnnnnnnnnnnnnnnnnnnnnnnnnnnnnnnnnnnnnnnnnnnnnnnnnnnnnnnnnnnnnnnnnnnnnnnnnnnnnnnnnnnnnnnnnnnnnnnnnnnnnnnnnnnnnnnnnnnnnnnnnnnnnnnnnnnnnnnnnnnnnnnnnnnnnnnnnnnnnnnnnnnnnnnnnnnnnnnnnnnnnnnnnnnnnnnnnnnnnnnnnnnnnnnnnnnnnnnnnnnnnnnnnnnnnnnnnnnnnnnnnnnnnnnnnnnnnnnnnnnnnnnnnnnnnnnnnnnnnnnnnnnnnnnnnnnnnnnnnnnnnnnnnnnnnnnnnnnnnnnnnnnnnnnnnnnnnnnnnnnnnnnnnnnnnnnnnnnnnnnnnnnnnnnnnnnnnnnnnnnnnnnnnnnnnnnnnnnnnnnnnnnnnnnnnnnnnnnnnnnnnnnnnnnnnnnnnnnnnnnnnnnnnnnnnnnnnnnnnnnnnnnnnnnnnnnnnnnnnnnnnnnnnnnnnnnnnnnnnnnnnnnnnnnnnnnnnnnnnnnnnnnnnnnnnnnnnnnnnnnnnnnnnnnnnnnnnnnnnnnnnnnnnnnnnnnnnnnnnnnnnnnnnnnnnnnnnnnnnnnnnnnnnnnnnnnnnnnnnnnnnnnnnnnnnnnnnnnnnnnnnnnnnnnnnnnnnnnnnnnnnnnnnnnnnnnnnnnnnnnnnnnnnnnnnnnnnnnnnnnnnnnnnnnnnnnnnnnnnnnnnnnnnnnnnnnnnnnnnnnnnnnnnnnnnnnnnnnnnnnnnnnnnnnnnnnnnnnnnnnnnnnnnnnnnnnnnnnnnnnnnnnnnnnnnnnnnnnnnnnnnnnnnnnnnnnnnnnnnnnnnnnnnnnnnnnnnnnnnnnnnnnnnnnnnnnnnnnnnnnnnnnnnnnnnnnnnnnnnnnnnnnnnnnnnnnnnnnnnnnnnnnnnnnnnnnnnnnnnnnnnnnnnnnnnnnnnnnnnnnnnnnnnnnnnnnnnnnnnnnnnnnnnnnnnnnnnnnnnnnnnnnnnnnnnnnnnnnnnnnnnnnnnnnnnnnnnnnnnnnnnnnnnnnnnnnnnnnnnnnnnnnnnnnnnnnnnnnnnnnnnnnnnnnnnnnnnnnnnnnnnnnnnnnnnnnnnnnnnnnnnnnnnnnnnnnnnnnnnnnnnnnnnnnnnnnnnnnnnnnnnnnnnnnnnnnnnnnnnnnnnnnnnnnnnnnnnnnnnnnnnnnnnnnnnnnnnnnnnnnnnnnnnnnnnnnnnnnnnnnnnnnnnnnnnnnnnnnnnnnnnnnnnnnnnnnnnnnnnnnnnnnnnnnnnnnnnnnnnnnnnnnnnnnnnnnnnnnnnnnnnnnnnnnnnnnnnnnnnnnnnnnnnnnnnnnnnnnnnnnnnnnnnnnnnnnnnnnnnnnnnnnnnnnnnnnnnnnnnnnnnnnnnnnnnnnnnnnnnnnnnnnnnnnnnnnnnnnnnnnnnnnnnnnnnnnnnnnnnnnnnnnnnnnnnnnnnnnnnnnnnnnnnnnnnnnnnnnnnnnnnnnnnnnnnnnnnnnnnnnnnnnnnnnnnnnnnnnnnnnnnnnnnnnnnnnnnnnnnnnnnnnnnnnnnnnnnnnnnnnnnnnnnnnnnnnnnnnnnnnnnnnnnnnnnnnnnnnnnnnnnnnnnnnnnnnnnnnnnnnnnnnnnnnnnnnnnnnnnnnnnnnnnnnnnnnnnnnnnnnnnnnnnnnnnnnnnnnnnnnnnnnnnnnnnnnnnnnnnnnnnnnnnnnnnnnnnnnnnnnnnnnnnnnnnnnnnnnnnnnnnnnnnnnnnnnnnnnnnnnnnnnnnnnnnnnnnnnnnnnnnnnnnnnnnnnnnnnnnnnnnnnnnnnnnnnnnnnnnnnnnnnnnnnnnnnnnnnnnnnnnnnnnnnnnnnnnnnnnnnnnnnnnnnnnnnnnnnnnnnnnnnnnnnnnnnnnnnnnnnnnnnnnnnnnnnnnnnnnnnnnnnnnnnnnnnnnnnnnnnnnnnnnnnnnnnnnnnnnnnnnnnnnnnnnnnnnnnnnnnnnnnnnnnnnnnnnnnnnnnnnnnnnnnnnnnnnnnnnnnnnnnnnnnnnnnnnnnnnnnnnnnnnnnnnnnnnnnnnnnnnnnnnnnnnnnnnnnnnnnnnnnnnnnnnnnnnnnnnnnnnnnnnnnnnnnnnnnnnnnnnnnnnnnnnnnnnnnnnnnnnnnnnnnnnnnnnnnnnnnnnnnnnnnnnnnnnnnnnnnnnnnnnnnnnnnnnnnnnnnnnnnnnnnnnnnnnnnnnnnnnnnnnnnnnnnnnnnnnnnnnnnnnnnnnnnnnnnnnnnnnnnnnnnnnnnnnnnnnnnnnnnnnnnnnnnnnnnnnnnnnnnnnnnnnnnnnnnnnnnnnnnnnnnnnnnnnnnnnnnnnnnnnnnnnnnnnnnnnnnnnnnnnnnnnnnnnnnnnnnnnnnnnnnnnnnnnnnnnnnnnnnnnnnnnnnnnnnnnnnnnnnnnnnnnnnnnnnnnnnnnnnnnnnnnnnnnnnnnnnnnnnnnnnnnnnnnnnnnnnnnnnnnnnnnnnnnnnnnnnnnnnnnnnnnnnnnnnnnnnnnnnnnnnnnnnnnnnnnnnnnnnnnnnnnnnnnnnnnnnnnnnnnnnnnnnnnnnnnnnnnnnnnnnnnnnnnnnnnnnnnnnnnnnnnnnnnnnnnnnnnnnnnnnnnnnnnnnnnnnnnnnnnnnnnnnnnnnnnnnnnnnnnnnnnnnnnnnnnnnnnnnnnnnnnnnnnnnnnnnnnnnnnnnnnnnnnnnnnnnnnnnnnnnnnnnnnnnnnnnnnnnnnnnnnnnnnnnnnnnnnnnnnnnnnnnnnnnnnnnnnnnnnnnnnnnnnnnnnnnnnnnnnnnnnnnnnnnnnnnnnnnnnnnnnnnnnnnnnnnnnnnnnnnnnnnnnnnnnnnnnnnnnnnnnnnnnnnnnnnnnnnnnnnnnnnnnnnnnnnnnnnnnnnnnnnnnnnnnnnnnnnnnnnnnnnnnnnnnnnnnnnnnnnnnnnnnnnnnnnnnnnnnnnnnnnnnnnnnnnnnnnnnnnnnnnnnnnnnnnnnnnnnnnnnnnnnnnnnnnnnnnnnnnnnnnnnnnnnnnnnnnnnnnnnnnnnnnnnnnnnnnnnnnnnnnnnnnnnnnnnnnnnnnnnnnnnnnnnnnnnnnnnnnnnnnnnnnnnnnnnnnnnnnnnnnnnnnnnnnnnnnnnnnnnnnnnnnnnnnnnnnnnnnnnnnnnnnnnnnnnnnnnnnnnnnnnnnnnnnnnnnnnnnnnnnnnnnnnnnnnnnnnnnnnnnnnnnnnnnnnnnnnnnnnnnnnnnnnnnnnnnnnnnnnnnnnnnnnnnnnnnnnnnnnnnnnnnnnnnnnnnnnnnnnnnnnnnnnnnnnnnnnnnnnnnnnnnnnnnnnnnnnnnnnnnnnnnnnnnnnnnnnnnnnnnnnnnnnnnnnnnnnnnnnnnnnnnnnnnnnnnnnnnnnnnnnnnnnnnnnnnnnnnnnnnnnnnnnnnnnnnnnnnnnnnnnnnnnnnnnnnnnnnnnnnnnnnnnnnnnnnnnnnnnnnnnnnnnnnnnnnnnnnnnnnnnnnnnnnnnnnnnnnnnnnnnnnnnnnnnnnnnnnnnnnnnnnnnnnnnnnnnnnnnnnnnnnnnnnnnnnnnnnnnnnnnnnnnnnnnnnnnnnnnnnnnnnnnnnnnnnnnnnnnnnnnnnnnnnnnnnnnnnnnnnnnnnnnnnnnnnnnnnnnnnnnnnnnnnnnnnnnnnnnnnnnnnnnnnnnnnnnnnnnnnnnnnnnnnnnnnnnnnnnnnnnnnnnnnnnnnnnnnnnnnnnnnnnnnnnnnnnnnnnnnnnnnnnnnnnnnnnnnnnnnnnnnnnnnnnnnnnnnnnnnnnnnnnnnnnnnnnnnnnnnnnnnnnnnnnnnnnnnnnnnnnnnnnnnnnnnnnnnnnnnnnnnnnnnnnnnnnnnnnnnnnnnnnnnnnnnnnnnnnnnnnnnnnnnnnnnnnnnnnnnnnnnnnnnnnnnnnnnnnnnnnnnnnnnnnnnnnnnnnnnnnnnnnnnnnnnnnnnnnnnnnnnnnnnnnnnnnnnnnnnnnnnnnnnnnnnnnnnnnnnnnnnnnnnnnnnnnnnnnnnnnnnnnnnnnnnnnnnnnnnnnnnnnnnnnnnnnnnnnnnnnnnnnnnnnnnnnnnnnnnnnnnnnnnnnnnnnnnnnnnnnnnnnnnnnnnnnnnnnnnnnnnnnnnnnnnnnnnnnnnnnnnnnnnnnnnnnnnnnnnnnnnnnnnnnnnnnnnnnnnnnnnnnnnnnnnnnnnnnnnnnnnnnnnnnnnnnnnnnnnnnnnnnnnnnnnnnnnnnnnnnnnnnnnnnnnnnnnnnnnnnnnnnnnnnnnnnnnnnnnnnnnnnnnnnnnnnnnnnnnnnnnnnnnnnnnnnnnnnnnnnnnnnnnnnnnnnnnnnnnnnnnnnnnnnnnnnnnnnnnnnnnnnnnnnnnnnnnnnnnnnnnnnnnnnnnnnnnnnnnnnnnnnnnnnnnnnnnnnnnnnnnnnnnnnnnnnnnnnnnnnnnnnnnnnnnnnnnnnnnnnnnnnnnnnnnnnnnnnnnnnnnnnnnnnnnnnnnnnnnnnnnnnnnnnnnnnnnnnnnnnnnnnnnnnnnnnnnnnnnnnnnnnnnnnnnnnnnnnnnnnnnnnnnnnnnnnnnnnnnnnnnnnnnnnnnnnnnnnnnnnnnnnnnnnnnnnnnnnnnnnnnnnnnnnnnnnnnnnnnnnnnnnnnnnnnnnnnnnnnnnnnnnnnnnnnnnnnnnnnnnnnnnnnnnnnnnnnnnnnnnnnnnnnnnnnnnnnnnnnnnnnnnnnnnnnnnnnnnnnnnnnnnnnnnnnnnnnnnnnnnnnnnnnnnnnnnnnnnnnnnnnnnnnnnnnnnnnnnnnnnnnnnnnnnnnnnnnnnnnnnnnnnnnnnnnnnnnnnnnnnnnnnnnnnnnnnnnnnnnnnnnnnnnnnnnnnnnnnnnnnnnnnnnnnnnnnnnnnnnnnnnnnnnnnnnnnnnnnnnnnnnnnnnnnnnnnnnnnnnnnnnnnnnnnnnnnnnnnnnnnnnnnnnnnnnnnnnnnnnnnnnnnnnnnnnnnnnnnnnnnnnnnnnnnnnnnnnnnnnnnnnnnnnnnnnnnnnnnnnnnnnnnnnnnnnnnnnnnnnnnnnnnnnnnnnnnnnnnnnnnnnnnnnnnnnnnnnnnnnnnnnnnnnnnnnnnnnnnnnnnnnnnnnnnnnnnnnnnnnnnnnnnnnnnnnnnnnnnnnnnnnnnnnnnnnnnnnnnnnnnnnnnnnnnnnnnnnnnnnnnnnnnnnnnnnnnnnnnnnnnnnnnnnnnnnnnnnnnnnnnnnnnnnnnnnnnnnnnnnnnnnnnnnnnnnnnnnnnnnnnnnnnnnnnnnnnnnnnnnnnnnnnnnnnnnnnnnnnnnnnnnnnnnnnnnnnnnnnnnnnnnnnnnnnnnnnnnnnnnnnnnnnnnnnnnnnnnnnnnnnnnnnnnnnnnnnnnnnnnnnnnnnnnnnnnnnnnnnnnnnnnnnnnnnnnnnnnnnnnnnnnnnnnnnnnnnnnnnnnnnnnnnnnnnnnnnnnnnnnnnnnnnnnnnnnnnnnnnnnnnnnnnnnnnnnnnnnnnnnnnnnnnnnnnnnnnnnnnnnnnnnnnnnnnnnnnnnnnnnnnnnnnnnnnnnnnnnnnnnnnnnnnnnnnnnnnnnnnnnnnnnnnnnnnnnnnnnnnnnnnnnnnnnnnnnnnnnnnnnnnnnnnnnnnnnnnnnnnnnnnnnnnnnnnnnnnnnnnnnnnnnnnnnnnnnnnnnnnnnnnnnnnnnnnnnnnnnnnnnnnnnnnnnnnnnnnnnnnnnnnnnnnnnnnnnnnnnnnnnnnnnnnnnnnnnnnnnnnnnnnnnnnnnnnnnnnnnnnnnnnnnnnnnnnnnnnnnnnnnnnnnnnnnnnnnnnnnnnnnnnnnnnnnnnnnnnnnnnnnnnnnnnnnnnnnnnnnnnnnnnnnnnnnnnnnnnnnnnnnnnnnnnnnnnnnnnnnnnnnnnnnnnnnnnnnnnnnnnnnnnnnnnnnnnnnnnnnnnnnnnnnnnnnnnnnnnnnnnnnnnnnnnnnnnnnnnnnnnnnnnnnnnnnnnnnnnnnnnnnnnnnnnnnnnnnnnnnnnnnnnnnnnnnnnnnnnnnnnnnnnnnnnnnnnnnnnnnnnnnnnnnnnnnnnnnnnnnnnnnnnnnnnnnnnnnnnnnnnnnnnnnnnnnnnnnnnnnnnnnnnnnnnnnnnnnnnnnnnnnnnnnnnnnnnnnnnnnnnnnnnnnnnnnnnnnnnnnnnnnnnnnnnnnnnnnnnnnnnnnnnnnnnnnnnnnnnnnnnnnnnnnnnnnnnnnnnnnnnnnnnnnnnnnnnnnnnnnnnnnnnnnnnnnnnnnnnnnnnnnnnnnnnnnnnnnnnnnnnnnnnnnnnnnnnnnnnnnnnnnnnnnnnnnnnnnnnnnnnnnnnnnnnnnnnnnnnnnnnnnnnnnnnnnnnnnnnnnnnnnnnnnnnnnnnnnnnnnnnnnnnnnnnnnnnnnnnnnnnnnnnnnnnnnnnnnnnnnnnnnnnnnnnnnnnnnnnnnnnnnnnnnnnnnnnnnnnnnnnnnnnnnnnnnnnnnnnnnnnnnnnnnnnnnnnnnnnnnnnnnnnnnnnnnnnnnnnnnnnnnnnnnnnnnnnnnnnnnnnnnnnnnnnnnnnnnnnnnnnnnnnnnnnnnnnnnnnnnnnnnnnnnnnnnnnnnnnnnnnnnnnnnnnnnnnnnnnnnnnnnnnnnnnnnnnnnnnnnnnnnnnnnnnnnnnnnnnnnnnnnnnnnnnnnnnnnnnnnnnnnnnnnnnnnnnnnnnnnnnnnnnnnnnnnnnnnnnnnnnnnnnnnnnnnnnnnnnnnnnnnnnnnnnnnnnnnnnnnnnnnnnnnnnnnnnnnnnnnnnnnnnnnnnnnnnnnnnnnnnnnnnnnnnnnnnnnnnnnnnnnnnnnnnnnnnnnnnnnnnnnnnnnnnnnnnnnnnnnnnnnnnnnnnnnnnnnnnnnnnnnnnnnnnnnnnnnnnnnnnnnnnnnnnnnnnnnnnnnnnnnnnnnnnnnnnnnnnnnnnnnnnnnnnnnnnnnnnnnnnnnnnnnnnnnnnnnnnnnnnnnnnnnnnnnnnnnnnnnnnnnnnnnnnnnnnnnnnnnnnnnnnnnnnnnnnnnnnnnnnnnnnnnnnnnnnnnnnnnnnnnnnnnnnnnnnnnnnnnnnnnnnnnnnnnnnnnnnnnnnnnnnnnnnnnnnnnnnnnnnnnnnnnnnnnnnnnnnnnnnnnnnnnnnnnnnnnnnnnnnnnnnnnnnnnnnnnnnnnnnnnnnnnnnnnnnnnnnnnnnnnnnnnnnnnnnnnnnnnnnnnnnnnnnnnnnnnnnnnnnnnnnnnnnnnnnnnnnnnnnnnnnnnnnnnnnnnnnnnnnnnnnnnnnnnnnnnnnnnnnnnnnnnnnnnnnnnnnnnnnnnnnnnnnnnnnnnnnnnnnnnnnnnnnnnnnnnnnnnnnnnnnnnnnnnnnnnnnnnnnnnnnnnnnnnnnnnnnnnnnnnnnnnnnnnnnnnnnnnnnnnnnnnnnnnnnnnnnnnnnnnnnnnnnnnnnnnnnnnnnnnnnnnnnnnnnnnnnnnnnnnnnnnnnnnnnnnnnnnnnnnnnnnnnnnnnnnnnnnnnnnnnnnnnnnnnnnnnnnnnnnnnnnnnnnnnnnnnnnnnnnnnnnnnnnnnnnnnnnnnnnnnnnnnnnnnnnnnnnnnnnnnnnnnnnnnnnnnnnnnnnnnnnnnnnnnnnnnnnnnnnnnnnnnnnnnnnnnnnnnnnnnnnnnnnnnnnnnnnnnnnnnnnnnnnnnnnnnnnnnnnnnnnnnnnnnnnnnnnnnnnnnnnnnnnnnnnnnnnnnnnnnnnnnnnnnnnnnnnnnnnnnnnnnnnnnnnnnnnnnnnnnnnnnnnnnnnnnnnnnnnnnnnnnnnnnnnnnnnnnnnnnnnnnnnnnnnnnnnnnnnnnnnnnnnnnnnnnnnnnnnnnnnnnnnnnnnnnnnnnnnnnnnnnnnnnnnnnnnnnnnnnnnnnnnnnnnnnnnnnnnnnnnnnnnnnnnnnnnnnnnnnnnnnnnnnnnnnnnnnnnnnnnnnnnnnnnnnnnnnnnnnnnnnnnnnnnnnnnnnnnnnnnnnnnnnnnnnnnnnnnnnnnnnnnnnnnnnnnnnnnnnnnnnnnnnnnnnnnnnnnnnnnnnnnnnnnnnnnnnnnnnnnnnnnnnnnnnnnnnnnnnnnnnnnnnnnnnnnnnnnnnnnnnnnnnnnnnnnnnnnnnnnnnnnnnnnnnnnnnnnnnnnnnnnnnnnnnnnnnnnnnnnnnnnnnnnnnnnnnnnnnnnnnnnnnnnnnnnnnnnnnnnnnnnnnnnnnnnnnnnnnnnnnnnnnnnnnnnnnnnnnnnnnnnnnnnnnnnnnnnnnnnnnnnnnnnnnnnnnnnnnnnnnnnnnnnnnnnnnnnnnnnnnnnnnnnnnnnnnnnnnnnnnnnnnnnnnnnnnnnnnnnnnnnnnnnnnnnnnnnnnnnnnnnnnnnnnnnnnnnnnnnnnnnnnnnnnnnnnnnnnnnnnnnnnnnnnnnnnnnnnnnnnnnnnnnnnnnnnnnnnnnnnnnnnnnnnnnnnnnnnnnnnnnnnnnnnnnnnnnnnnnnnnnnnnnnnnnnnnnnnnnnnnnnnnnnnnnnnnnnnnnnnnnnnnnnnnnnnnnnnnnnnnnnnnnnnnnnnnnnnnnnnnnnnnnnnnnnnnnnnnnnnnnnnnnnnnnnnnnnnnnnnnnnnnnnnnnnnnnnnnnnnnnnnnnnnnnnnnnnnnnnnnnnnnnnnnnnnnnnnnnnnnnnnnnnnnnnnnnnnnnnnnnnnnnnnnnnnnnnnnnnnnnnnnnnnnnnnnnnnnnnnnnnnnnnnnnnnnnnnnnnnnnnnnnnnnnnnnnnnnnnnnnnnnnnnnnnnnnnnnnnnnnnnnnnnnnnnnnnnnnnnnnnnnnnnnnnnnnnnnnnnnnnnnnnnnnnnnnnnnnnnnnnnnnnnnnnnnnnnnnnnnnnnnnnnnnnnnnnnnnnnnnnnnnnnnnnnnnnnnnnnnnnnnnnnnnnnnnnnnnnnnnnnnnnnnnnnnnnnnnnnnnnnnnnnnnnnnnnnnnnnnnnnnnnnnnnnnnnnnnnnnnnnnnnnnnnnnnnnnnnnnnnnnnnnnnnnnnnnnnnnnnnnnnnnnnnnnnnnnnnnnnnnnnnnnnnnnnnnnnnnnnnnnnnnnnnnnnnnnnnnnnnnnnnnnnnnnnnnnnnnnnnnnnnnnnnnnnnnnnnnnnnnnnnnnnnnnnnnnnnnnnnnnnnnnnnnnnnnnnnnnnnnnnnnnnnnnnnnnnnnnnnnnnnnnnnnnnnnnnnnnnnnnnnnnnnnnnnnnnnnnnnnnnnnnnnnnnnnnnnnnnnnnnnnnnnnnnnnnnnnnnnnnnnnnnnnnnnnnnnnnnnnnnnnnnnnnnnnnnnnnnnnnnnnnnnnnnnnnnnnnnnnnnnnnnnnnnnnnnnnnnnnnnnnnnnnnnnnnnnnnnnnnnnnnnnnnnnnnnnnnnnnnnnnnnnnnnnnnnnnnnnnnnnnnnnnnnnnnnnnnnnnnnnnnnnnnnnnnnnnnnnnnnnnnnnnnnnnnnnnnnnnnnnnnnnnnnnnnnnnnnnnnnnnnnnnnnnnnnnnnnnnnnnnnnnnnnnnnnnnnnnnnnnnnnnnnnnnnnnnnnnnnnnnnnnnnnnnnnnnnnnnnnnnnnnnnnnnnnnnnnnnnnnnnnnnnnnnnnnnnnnnnnnnnnnnnnnnnnnnnnnnnnnnnnnnnnnnnnnnnnnnnnnnnnnnnnnnnnnnnnnnnnnnnnnnnnnnnnnnnnnnnnnnnnnnnnnnnnnnnnnnnnnnnnnnnnnnnnnnnnnnnnnnnnnnnnnnnnnnnnnnnnnnnnnnnnnnnnnnnnnnnnnnnnnnnnnnnnnnnnnnnnnnnnnnnnnnnnnnnnnnnnnnnnnnnnnnnnnnnnnnnnnnnnnnnnnnnnnnnnnnnnnnnnnnnnnnnnnnnnnnnnnnnnnnnnnnnnnnnnnnnnnnnnnnnnnnnnnnnnnnnnnnnnnnnnnnnnnnnnnnnnnnnnnnnnnnnnnnnnnnnnnnnnnnnnnnnnnnnnnnnnnnnnnnnnnnnnnnnnnnnnnnnnnnnnnnnnnnnnnnnnnnnnnnnnnnnnnnnnnnnnnnnnnnnnnnnnnnnnnnnnnnnnnnnnnnnnnnnnnnnnnnnnnnnnnnnnnnnnnnnnnnnnnnnnnnnnnnnnnnnnnnnnnnnnnnnnnnnnnnnnnnnnnnnnnnnnnnnnnnnnnnnnnnnnnnnnnnnnnnnnnnnnnnnnnnnnnnnnnnnnnnnnnnnnnnnnnnnnnnnnnnnnnnnnnnnnnnnnnnnnnnnnnnnnnnnnnnnnnnnnnnnnnnnnnnnnnnnnnnnnnnnnnnnnnnnnnnnnnnnnnnnnnnnnnnnnnnnnnnnnnnnnnnnnnnnnnnnnnnnnnnnnnnnnnnnnnnnnnnnnnnnnnnnnnnnnnnnnnnnnnnnnnnnnnnnnnnnnnnnnnnnnnnnnnnnnnnnnnnnnnnnnnnnnnnnnnnnnnnnnnnnnnnnnnnnnnnnnnnnnnnnnnnnnnnnnnnnnnnnnnnnnnnnnnnnnnnnnnnnnnnnnnnnnnnnnnnnnnnnnnnnnnnnnnnnnnnnnnnnnnnnnnnnnnnnnnnnnnnnnnnnnnnnnnnnnnnnnnnnnnnnnnnnnnnnnnnnnnnnnnnnnnnnnnnnnnnnnnnnnnnnnnnnnnnnnnnnnnnnnnnnnnnnnnnnnnnnnnnnnnnnnnnnnnnnnnnnnnnnnnnnnnnnnnnnnnnnnnnnnnnnnnnnnnnnnnnnnnnnnnnnnnnnnnnnnnnnnnnnnnnnnnnnnnnnnnnnnnnnnnnnnnnnnnnnnnnnnnnnnnnnnnnnnnnnnnnnnnnnnnnnnnnnnnnnnnnnnnnnnnnnnnnnnnnnnnnnnnnnnnnnnnnnnnnnnnnnnnnnnnnnnnnnnnnnnnnnnnnnnnnnnnnnnnnnnnnnnnnnnnnnnnnnnnnnnnnnnnnnnnnnnnnnnnnnnnnnnnnnnnnnnnnnnnnnnnnnnnnnnnnnnnnnnnnnnnnnnnnnnnnnnnnnnnnnnnnnnnnnnnnnnnnnnnnnnnnnnnnnnnnnnnnnnnnnnnnnnnnnnnnnnnnnnnnnnnnnnnnnnnnnnnnnnnnnnnnnnnnnnnnnnnnnnnnnnnnnnnnnnnnnnnnnnnnnnnnnnnnnnnnnnnnnnnnnnnnnnnnnnnnnnnnnnnnnnnnnnnnnnnnnnnnnnnnnnnnnnnnnnnnnnnnnnnnnnnnnnnnnnnnnnnnnnnnnnnnnnnnnnnnnnnnnnnnnnnnnnnnnnnnnnnnnnnnnnnnnnnnnnnnnnnnnnnnnnnnnnnnnnnnnnnnnnnnnnnnnnnnnnnnnnnnnnnnnnnnnnnnnnnnnnnnnnnnnnnnnnnnnnnnnnnnnnnnnnnnnnnnnnnnnnnnnnnnnnnnnnnnnnnnnnnnnnnnnnnnnnnnnnnnnnnnnnnnnnnnnnnnnnnnnnnnnnnnnnnnnnnnnnnnnnnnnnnnnnnnnnnnnnnnnnnnnnnnnnnnnnnnnnnnnnnnnnnnnnnnnnnnnnnnnnnnnnnnnnnnnnnnnnnnnnnnnnnnnnnnnnnnnnnnnnnnnnnnnnnnnnnnnnnnnnnnnnnnnnnnnnnnnnnnnnnnnnnnnnnnnnnnnnnnnnnnnnnnnnnnnnnnnnnnnnnnnnnnnnnnnnnnnnnnnnnnnnnnnnnnnnnnnnnnnnnnnnnnnnnnnnnnnnnnnnnnnnnnnnnnnnnnnnnnnnnnnnnnnnnnnnnnnnnnnnnnnnnnnnnnnnnnnnnnnnnnnnnnnnnnnnnnnnnnnnnnnnnnnnnnnnnnnnnnnnnnnnnnnnnnnnnnnnnnnnnnnnnnnnnnnnnnnnnnnnnnnnnnnnnnnnnnnnnnnnnnnnnnnnnnnnnnnnnnnnnnnnnnnnnnnnnnnnnnnnnnnnnnnnnnnnnnnnnnnnnnnnnnnnnnnnnnnnnnnnnnnnnnnnnnnnnnnnnnnnnnnnnnnnnnnnnnnnnnnnnnnnnnnnnnnnnnnnnnnnnnnnnnnnnnnnnnnnnnnnnnnnnnnnnnnnnnnnnnnnnnnnnnnnnnnnnnnnnnnnnnnnnnnnnnnnnnnnnnnnnnnnnnnnnnnnnnnnnnnnnnnnnnnnnnnnnnnnnnnnnnnnnnnnnnnnnnnnnnnnnnnnnnnnnnnnnnnnnnnnnnnnnnnnnnnnnnnnnnnnnnnnnnnnnnnnnnnnnnnnnnnnnnnnnnnnnnnnnnnnnnnnnnnnnnnnnnnnnnnnnnnnnnnnnnnnnnnnnnnnnnnnnnnnnnnnnnnnnnnnnnnnnnnnnnnnnnnnnnnnnnnnnnnnnnnnnnnnnnnnnnnnnnnnnnnnnnnnnnnnnnnnnnnnnnnnnnnnnnnnnnnnnnnnnnnnnnnnnnnnnnnnnnnnnnnnnnnnnnnnnnnnnnnnnnnnnnnnnnnnnnnnnnnnnnnnnnnnnnnnnnnnnnnnnnnnnnnnnnnnnnnnnnnnnnnnnnnnnnnnnnnnnnnnnnnnnnnnnnnnnnnnnnnnnnnnnnnnnnnnnnnnnnnnnnnnnnnnnnnnnnnnnnnnnnnnnnnnnnnnnnnnnnnnnnnnnnnnnnnnnnnnnnnnnnnnnnnnnnnnnnnnnnnnnnnnnnnnnnnnnnnnnnnnnnnnnnnnnnnnnnnnnnnnnnnnnnnnnnnnnnnnnnnnnnnnnnnnnnnnnnnnnnnnnnnnnnnnnnnnnnnnnnnnnnnnnnnnnnnnnnnnnnnnnnnnnnnnnnnnnnnnnnnnnnnnnnnnnnnnnnnnnnnnnnnnnnnnnnnnnnnnnnnnnnnnnnnnnnnnnnnnnnnnnnnnnnnnnnnnnnnnnnnnnnnnnnnnnnnnnnnnnnnnnnnnnnnnnnnnnnnnnnnnnnnnnnnnnnnnnnnnnnnnnnnnnnnnnnnnnnnnnnnnnnnnnnnnnnnnnnnnnnnnnnnnnnnnnnnnnnnnnnnnnnnnnnnnnnnnnnnnnnnnnnnnnnnnnnnnnnnnnnnnnnnnnnnnnnnnnnnnnnnnnnnnnnnnnnnnnnnnnnnnnnnnnnnnnnnnnnnnnnnnnnnnnnnnnnnnnnnnnnnnnnnnnnnnnnnnnnnnnnnnnnnnnnnnnnnnnnnnnnnnnnnnnnnnnnnnnnnnnnnnnnnnnnnnnnnnnnnnnnnnnnnnnnnnnnnnnnnnnnnnnnnnnnnnnnnnnnnnnnnnnnnnnnnnnnnnnnnnnnnnnnnnnnnnnnnnnnnnnnnnnnnnnnnnnnnnnnnnnnnnnnnnnnnnnnnnnnnnnnnnnnnnnnnnnnnnnnnnnnnnnnnnnnnnnnnnnnnnnnnnnnnnnnnnnnnnnnnnnnnnnnnnnnnnnnnnnnnnnnnnnnnnnnnnnnnnnnnnnnnnnnnnnnnnnnnnnnnnnnnnnnnnnnnnnnnnnnnnnnnnnnnnnnnnnnnnnnnnnnnnnnnnnnnnnnnnnnnnnnnnnnnnnnnnnnnnnnnnnnnnnnnnnnnnnnnnnnnnnnnnnnnnnnnnnnnnnnnnnnnnnnnnnnnnnnnnnnnnnnnnnnnnnnnnnnnnnnnnnnnnnnnnnnnnnnnnnnnnnnnnnnnnnnnnnnnnnnnnnnnnnnnnnnnnnnnnnnnnnnnnnnnnnnnnnnnnnnnnnnnnnnnnnnnnnnnnnnnnnnnnnnnnnnnnnnnnnnnnnnnnnnnnnnnnnnnnnnnnnnnnnnnnnnnnnnnnnnnnnnnnnnnnnnnnnnnnnnnnnnnnnnnnnnnnnnnnnnnnnnnnnnnnnnnnnnnnnnnnnnnnnnnnnnnnnnnnnnnnnnnnnnnnnnnnnnnnnnnnnnnnnnnnnnnnnnnnnnnnnnnnnnnnnnnnnnnnnnnnnnnnnnnnnnnnnnnnnnnnnnnnnnnnnnnnnnnnnnnnnnnnnnnnnnnnnnnnnnnnnnnnnnnnnnnnnnnnnnnnnnnnnnnnnnnnnnnnnnnnnnnnnnnnnnnnnnnnnnnnnnnnnnnnnnnnnnnnnnnnnnnnnnnnnnnnnnnnnnnnnnnnnnnnnnnnnnnnnnnnnnnnnnnnnnnnnnnnnnnnnnnnnnnnnnnnnnnnnnnnnnnnnnnnnnnnnnnnnnnnnnnnnnnnnnnnnnnnnnnnnnnnnnnnnnnnnnnnnnnnnnnnnnnnnnnnnnnnnnnnnnnnnnnnnnnnnnnnnnnnnnnnnnnnnnnnnnnnnnnnnnnnnnnnnnnnnnnnnnnnnnnnnnnnnnnnnnnnnnnnnnnnnnnnnnnnnnnnnnnnnnnnnnnnnnnnnnnnnnnnnnnnnnnnnnnnnnnnnnnnnnnnnnnnnnnnnnnnnnnnnnnnnnnnnnnnnnnnnnnnnnnnnnnnnnnnnnnnnnnnnnnnnnnnnnnnnnnnnnnnnnnnnnnnnnnnnnnnnnnnnnnnnnnnnnnnnnnnnnnnnnnnnnnnnnnnnnnnnnnnnnnnnnnnnnnnnnnnnnnnnnnnnnnnnnnnnnnnnnnnnnnnnnnnnnnnnnnnnnnnnnnnnnnnnnnnnnnnnnnnnnnnnnnnnnnnnnnnnnnnnnnnnnnnnnnnnnnnnnnnnnnnnnnnnnnnnnnnnnnnnnnnnnnnnnnnnnnnnnnnnnnnnnnnnnnnnnnnnnnnnnnnnnnnnnnnnnnnnnnnnnnnnnnnnnnnnnnnnnnnnnnnnnnnnnnnnnnnnnnnnnnnnnnnnnnnnnnnnnnnnnnnnnnnnnnnnnnnnnnnnnnnnnnnnnnnnnnnnnnnnnnnnnnnnnnnnnnnnnnnnnnnnnnnnnnnnnnnnnnnnnnnnnnnnnnnnnnnnnnnnnnnnnnnnnnnnnnnnnnnnnnnnnnnnnnnnnnnnnnnnnnnnnnnnnnnnnnnnnnnnnnnnnnnnnnnnnnnnnnnnnnnnnnnnnnnnnnnnnnnnnnnnnnnnnnnnnnnnnnnnnnnnnnnnnnnnnnnnnnnnnnnnnnnnnnnnnnnnnnnnnnnnnnnnnnnnnnnnnnnnnnnnnnnnnnnnnnnnnnnnnnnnnnnnnnnnnnnnnnnnnnnnnnnnnnnnnnnnnnnnnnnnnnnnnnnnnnnnnnnnnnnnnnnnnnnnnnnnnnnnnnnnnnnnnnnnnnnnnnnnnnnnnnnnnnnnnnnnnnnnnnnnnnnnnnnnnnnnnnnnnnnnnnnnnnnnnnnnnnnnnnnnnnnnnnnnnnnnnnnnnnnnnnnnnnnnnnnnnnnnnnnnnnnnnnnnnnnnnnnnnnnnnnnnnnnnnnnnnnnnnnnnnnnnnnnnnnnnnnnnnnnnnnnnnnnnnnnnnnnnnnnnnnnnnnnnnnnnnnnnnnnnnnnnnnnnnnnnnnnnnnnnnnnnnnnnnnnnnnnnnnnnnnnnnnnnnnnnnnnnnnnnnnnnnnnnnnnnnnnnnnnnnnnnnnnnnnnnnnnnnnnnnnnnnnnnnnnnnnnnnnnnnnnnnnnnnnnnnnnnnnnnnnnnnnnnnnnnnnnnnnnnnnnnnnnnnnnnnnnnnnnnnnnnnnnnnnnnnnnnnnnnnnnnnnnnnnnnnnnnnnnnnnnnnnnnnnnnnnnnnnnnnnnnnnnnnnnnnnnnnnnnnnnnnnnnnnnnnnnnnnnnnnnnnnnnnnnnnnnnnnnnnnnnnnnnnnnnnnnnnnnnnnnnnnnnnnnnnnnnnnnnnnnnnnnnnnnnnnnnnnnnnnnnnnnnnnnnnnnnnnnnnnnnnnnnnnnnnnnnnnnnnnnnnnnnnnnnnnnnnnnnnnnnnnnnnnnnnnnnnnnnnnnnnnnnnnnnnnnnnnnnnnnnnnnnnnnnnnnnnnnnnnnnnnnnnnnnnnnnnnnnnnnnnnnnnnnnnnnnnnnnnnnnnnnnnnnnnnnnnnnnnnnnnnnnnnnnnnnnnnnnnnnnnnnnnnnnnnnnnnnnnnnnnnnnnnnnnnnnnnnnnnnnnnnnnnnnnnnnnnnnnnnnnnnnnnnnnnnnnnnnnnnnnnnnnnnnnnnnnnnnnnnnnnnnnnnnnnnnnnnnnnnnnnnnnnnnnnnnnnnnnnnnnnnnnnnnnnnnnnnnnnnnnnnnnnnnnnnnnnnnnnnnnnnnnnnnnnnnnnnnnnnnnnnnnnnnnnnnnnnnnnnnnnnnnnnnnnnnnnnnnnnnnnnnnnnnnnnnnnnnnnnnnnnnnnnnnnnnnnnnnnnnnnnnnnnnnnnnnnnnnnnnnnnnnnnnnnnnnnnnnnnnnnnnnnnnnnnnnnnnnnnnnnnnnnnnnnnnnnnnnnnnnnnnnnnnnnnnnnnnnnnnnnnnnnnnnnnnnnnnnnnnnnnnnnnnnnnnnnnnnnnnnnnnnnnnnnnnnnnnnnnnnnnnnnnnnnnnnnnnnnnnnnnnnnnnnnnnnnnnnnnnnnnnnnnnnnnnnnnnnnnnnnnnnnnnnnnnnnnnnnnnnnnnnnnnnnnnnnnnnnnnnnnnnnnnnnnnnnnnnnnnnnnnnnnnnnnnnnnnnnnnnnnnnnnnnnnnnnnnnnnnnnnnnnnnnnnnnnnnnnnnnnnnnnnnnnnnnnnnnnnnnnnnnnnnnnnnnnnnnnnnnnnnnnnnnnnnnnnnnnnnnnnnnnnnnnnnnnnnnnnnnnnnnnnnnnnnnnnnnnnnnnnnnnnnnnnnnnnnnnnnnnnnnnnnnnnnnnnnnnnnnnnnnnnnnnnnnnnnnnnnnnnnnnnnnnnnnnnnnnnnnnnnnnnnnnnnnnnnnnnnnnnnnnnnnnnnnnnnnnnnnnnnnnnnnnnnnnnnnnnnnnnnnnnnnnnnnnnnnnnnnnnnnnnnnnnnnnnnnnnnnnnnnnnnnnnnnnnnnnnnnnnnnnnnnnnnnnnnnnnnnnnnnnnnnnnnnnnnnnnnnnnnnnnnnnnnnnnnnnnnnnnnnnnnnnnnnnnnnnnnnnnnnnnnnnnnnnnnnnnnnnnnnnnnnnnnnnnnnnnnnnnnnnnnnnnnnnnnnnnnnnnnnnnnnnnnnnnnnnnnnnnnnnnnnnnnnnnnnnnnnnnnnnnnnnnnnnnnnnnnnnnnnnnnnnnnnnnnnnnnnnnnnnnnnnnnnnnnnnnnnnnnnnnnnnnnnnnnnnnnnnnnnnnnnnnnnnnnnnnnnnnnnnnnnnnnnnnnnnnnnnnnnnnnnnnnnnnnnnnnnnnnnnnnnnnnnnnnnnnnnnnnnnnnnnnnnnnnnnnnnnnnnnnnnnnnnnnnnnnnnnnnnnnnnnnnnnnnnnnnnnnnnnnnnnnnnnnnnnnnnnnnnnnnnnnnnnnnnnnnnnnnnnnnnnnnnnnnnnnnnnnnnnnnnnnnnnnnnnnnnnnnnnnnnnnnnnnnnnnnnnnnnnnnnnnnnnnnnnnnnnnnnnnnnnnnnnnnnnnnnnnnnnnnnnnnnnnnnnnnnnnnnnnnnnnnnnnnnnnnnnnnnnnnnnnnnnnnnnnnnnnnnnnnnnnnnnnnnnnnnnnnnnnnnnnnnnnnnnnnnnnnnnnnnnnnnnnnnnnnnnnnnnnnnnnnnnnnnnnnnnnnnnnnnnnnnnnnnnnnnnnnnnnnnnnnnnnnnnnnnnnnnnnnnnnnnnnnnnnnnnnnnnnnnnnnnnnnnnnnnnnnnnnnnnnnnnnnnnnnnnnnnnnnnnnnnnnnnnnnnnnnnnnnnnnnnnnnnnnnnnnnnnnnnnnnnnnnnnnnnnnnnnnnnnnnnnnnnnnnnnnnnnnnnnnnnnnnnnnnnnnnnnnnnnnnnnnnnnnnnnnnnnnnnnnnnnnnnnnnnnnnnnnnnnnnnnnnnnnnnnnnnnnnnnnnnnnnnnnnnnnnnnnnnnnnnnnnnnnnnnnnnnnnnnnnnnnnnnnnnnnnnnnnnnnnnnnnnnnnnnnnnnnnnnnnnnnnnnnnnnnnnnnnnnnnnnnnnnnnnnnnnnnnnnnnnnnnnnnnnnnnnnnnnnnnnnnnnnnnnnnnnnnnnnnnnnnnnnnnnnnnnnnnnnnnnnnnnnnnnnnnnnnnnnnnnnnnnnnnnnnnnnnnnnnnnnnnnnnnnnnnnnnnnnnnnnnnnnnnnnnnnnnnnnnnnnnnnnnnnnnnnnnnnnnnnnnnnnnnnnnnnnnnnnnnnnnnnnnnnnnnnnnnnnnnnnnnnnnnnnnnnnnnnnnnnnnnnnnnnnnnnnnnnnnnnnnnnnnnnnnnnnnnnnnnnnnnnnnnnnnnnnnnnnnnnnnnnnnnnnnnnnnnnnnnnnnnnnnnnnnnnnnnnnnnnnnnnnnnnnnnnnnnnnnnnnnnnnnnnnnnnnnnnnnnnnnnnnnnnnnnnnnnnnnnnnnnnnnnnnnnnnnnnnnnnnnnnnnnnnnnnnnnnnnnnnnnnnnnnnnnnnnnnnnnnnnnnnnnnnnnnnnnnnnnnnnnnnnnnnnnnnnnnnnnnnnnnnnnnnnnnnnnnnnnnnnnnnnnnnnnnnnnnnnnnnnnnnnnnnnnnnnnnnnnnnnnnnnnnnnnnnnnnnnnnnnnnnnnnnnnnnnnnnnnnnnnnnnnnnnnnnnnnnnnnnnnnnnnnnnnnnnnnnnnnnnnnnnnnnnnnnnnnnnnnnnnnnnnnnnnnnnnnnnnnnnnnnnnnnnnnnnnnnnnnnnnnnnnnnnnnnnnnnnnnnnnnnnnnnnnnnnnnnnnnnnnnnnnnnnnnnnnnnnnnnnnnnnnnnnnnnnnnnnnnnnnnnnnnnnnnnnnnnnnnnnnnnnnnnnnnnnnnnnnnnnnnnnnnnnnnnnnnnnnnnnnnnnnnnnnnnnnnnnnnnnnnnnnnnnnnnnnnnnnnnnnnnnnnnnnnnnnnnnnnnnnnnnnnnnnnnnnnnnnnnnnnnnnnnnnnnnnnnnnnnnnnnnnnnnnnnnnnnnnnnnnnnnnnnnnnnnnnnnnnnnnnnnnnnnnnnnnnnnnnnnnnnnnnnnnnnnnnnnnnnnnnnnnnnnnnnnnnnnnnnnnnnnnnnnnnnnnnnnnnnnnnnnnnnnnnnnnnnnnnnnnnnnnnnnnnnnnnnnnnnnnnnnnnnnnnnnnnnnnnnnnnnnnnnnnnnnnnnnnnnnnnnnnnnnnnnnnnnnnnnnnnnnnnnnnnnnnnnnnnnnnnnnnnnnnnnnnnnnnnnnnnnnnnnnnnnnnnnnnnnnnnnnnnnnnnnnnnnnnnnnnnnnnnnnnnnnnnnnnnnnnnnnnnnnnnnnnnnnnnnnnnnnnnnnnnnnnnnnnnnnnnnnnnnnnnnnnnnnnnnnnnnnnnnnnnnnnnnnnnnnnnnnnnnnnnnnnnnnnnnnnnnnnnnnnnnnnnnnnnnnnnnnnnnnnnnnnnnnnnnnnnnnnnnnnnnnnnnnnnnnnnnnnnnnnnnnnnnnnnnnnnnnnnnnnnnnnnnnnnnnnnnnnnnnnnnnnnnnnnnnnnnnnnnnnnnnnnnnnnnnnnnnnnnnnnnnnnnnnnnnnnnnnnnnnnnnnnnnnnnnnnnnnnnnnnnnnnnnnnnnnnnnnnnnnnnnnnnnnnnnnnnnnnnnnnnnnnnnnnnnnnnnnnnnnnnnnnnnnnnnnnnnnnnnnnnnnnnnnnnnnnnnnnnnnnnnnnnnnnnnnnnnnnnnnnnnnnnnnnnnnnnnnnnnnnnnnnnnnnnnnnnnnnnnnnnnnnnnnnnnnnnnnnnnnnnnnnnnnnnnnnnnnnnnnnnnnnnnnnnnnnnnnnnnnnnnnnnnnnnnnnnnnnnnnnnnnnnnnnnnnnnnnnnnnnnnnnnnnnnnnnnnnnnnnnnnnnnnnnnnnnnnnnnnnnnnnnnnnnnnnnnnnnnnnnnnnnnnnnnnnnnnnnnnnnnnnnnnnnnnnnnnnnnnnnnnnnnnnnnnnnnnnnnnnnnnnnnnnnnnnnnnnnnnnnnnnnnnnnnnnnnnnnnnnnnnnnnnnnnnnnnnnnnnnnnnnnnnnnnnnnnnnnnnnnnnnnnnnnnnnnnnnnnnnnnnnnnnnnnnnnnnnnnnnnnnnnnnnnnnnnnnnnnnnnnnnnnnnnnnnnnnnnnnnnnnnnnnnnnnnnnnnnnnnnnnnnnnnnnnnnnnnnnnnnnnnnnnnnnnnnnnnnnnnnnnnnnnnnnnnnnnnnnnnnnnnnnnnnnnnnnnnnnnnnnnnnnnnnnnnnnnnnnnnnnnnnnnnnnnnnnnnnnnnnnnnnnnnnnnnnnnnnnnnnnnnnnnnnnnnnnnnnnnnnnnnnnnnnnnnnnnnnnnnnnnnnnnnnnnnnnnnnnnnnnnnnnnnnnnnnnnnnnnnnnnnnnnnnnnnnnnnnnnnnnnnnnnnnnnnnnnnnnnnnnnnnnnnnnnnnnnnnnnnnnnnnnnnnnnnnnnnnnnnnnnnnnnnnnnnnnnnnnnnnnnnnnnnnnnnnnnnnnnnnnnnnnnnnnnnnnnnnnnnnnnnnnnnnnnnnnnnnnnnnnnnnnnnnnnnnnnnnnnnnnnnnnnnnnnnnnnnnnnnnnnnnnnnnnnnnnnnnnnnnnnnnnnnnnnnnnnnnnnnnnnnnnnnnnnnnnnnnnnnnnnnnnnnnnnnnnnnnnnnnnnnnnnnnnnnnnnnnnnnnnnnnnnnnnnnnnnnnnnnnnnnnnnnnnnnnnnnnnnnnnnnnnnnnnnnnnnnnnnnnnnnnnnnnnnnnnnnnnnnnnnnnnnnnnnnnnnnnnnnnnnnnnnnnnnnnnnnnnnnnnnnnnnnnnnnnnnnnnnnnnnnnnnnnnnnnnnnnnnnnnnnnnnnnnnnnnnnnnnnnnnnnnnnnnnnnnnnnnnnnnnnnnnnnnnnnnnnnnnnnnnnnnnnnnnnnnnnnnnnnnnnnnnnnnnnnnnnnnnnnnnnnnnnnnnnnnnnnnnnnnnnnnnnnnnnnnnnnnnnnnnnnnnnnnnnnnnnnnnnnnnnnnnnnnnnnnnnnnnnnnnnnnnnnnnnnnnnnnnnnnnnnnnnnnnnnnnnnnnnnnnnnnnnnnnnnnnnnnnnnnnnnnnnnnnnnnnnnnnnnnnnnnnnnnnnnnnnnnnnnnnnnnnnnnnnnnnnnnnnnnnnnnnnnnnnnnnnnnnnnnnnnnnnnnnnnnnnnnnnnnnnnnnnnnnnnnnnnnnnnnnnnnnnnnnnnnnnnnnnnnnnnnnnnnnnnnnnnnnnnnnnnnnnnnnnnnnnnnnnnnnnnnnnnnnnnnnnnnnnnnnnnnnnnnnnnnnnnnnnnnnnnnnnnnnnnnnnnnnnnnnnnnnnnnnnnnnnnnnnnnnnnnnnnnnnnnnnnnnnnnnnnnnnnnnnnnnnnnnnnnnnnnnnnnnnnnnnnnnnnnnnnnnnnnnnnnnnnnnnnnnnnnnnnnnnnnnnnnnnnnnnnnnnnnnnnnnnnnnnnnnnnnnnnnnnnnnnnnnnnnnnnnnnnnnnnnnnnnnnnnnnnnnnnnnnnnnnnnnnnnnnnnnnnnnnnnnnnnnnnnnnnnnnnnnnnnnnnnnnnnnnnnnnnnnnnnnnnnnnnnnnnnnnnnnnnnnnnnnnnnnnnnnnnnnnnnnnnnnnnnnnnnnnnnnnnnnnnnnnnnnnnnnnnnnnnnnnnnnnnnnnnnnnnnnnnnnnnnnnnnnnnnnnnnnnnnnnnnnnnnnnnnnnnnnnnnnnnnnnnnnnnnnnnnnnnnnnnnnnnnnnnnnnnnnnnnnnnnnnnnnnnnnnnnnnnnnnnnnnnnnnnnnnnnnnnnnnnnnnnnnnnnnnnnnnnnnnnnnnnnnnnnnnnnnnnnnnnnnnnnnnnnnnnnnnnnnnnnnnnnnnnnnnnnnnnnnnnnnnnnnnnnnnnnnnnnnnnnnnnnnnnnnnnnnnnnnnnnnnnnnnnnnnnnnnnnnnnnnnnnnnnnnnnnnnnnnnnnnnnnnnnnnnnnnnnnnnnnnnnnnnnnnnnnnnnnnnnnnnnnnnnnnnnnnnnnnnnnnnnnnnnnnnnnnnnnnnnnnnnnnnnnnnnnnnnnnnnnnnnnnnnnnnnnnnnnnnnnnnnnnnnnnnnnnnnnnnnnnnnnnnnnnnnnnnnnnnnnnnnnnnnnnnnnnnnnnnnnnnnnnnnnnnnnnnnnnnnnnnnnnnnnnnnnnnnnnnnnnnnnnnnnnnnnnnnnnnnnnnnnnnnnnnnnnnnnnnnnnnnnnnnnnnnnnnnnnnnnnnnnnnnnnnnnnnnnnnnnnnnnnnnnnnnnnnnnnnnnnnnnnnnnnnnnnnnnnnnnnnnnnnnnnnnnnnnnnnnnnnnnnnnnnnnnnnnnnnnnnnnnnnnnnnnnnnnnnnnnnnnnnnnnnnnnnnnnnnnnnnnnnnnnnnnnnnnnnnnnnnnnnnnnnnnnnnnnnnnnnnnnnnnnnnnnnnnnnnnnnnnnnnnnnnnnnnnnnnnnnnnnnnnnnnnnnnnnnnnnnnnnnnnnnnnnnnnnnnnnnnnnnnnnnnnnnnnnnnnnnnnnnnnnnnnnnnnnnnnnnnnnnnnnnnnnnnnnnnnnnnnnnnnnnnnnnnnnnnnnnnnnnnnnnnnnnnnnnnnnnnnnnnnnnnnnnnnnnnnnnnnnnnnnnnnnnnnnnnnnnnnnnnnnnnnnnnnnnnnnnnnnnnnnnnnnnnnnnnnnnnnnnnnnnnnnnnnnnnnnnnnnnnnnnnnnnnnnnnnnnnnnnnnnnnnnnnnnnnnnnnnnnnnnnnnnnnnnnnnnnnnnnnnnnnnnnnnnnnnnnnnnnnnnnnnnnnnnnnnnnnnnnnnnnnnnnnnnnnnnnnnnnnnnnnnnnnnnnnnnnnnnnnnnnnnnnnnnnnnnnnnnnnnnnnnnnnnnnnnnnnnnnnnnnnnnnnnnnnnnnnnnnnnnnnnnnnnnnnnnnnnnnnnnnnnnnnnnnnnnnnnnnnnnnnnnnnnnnnnnnnnnnnnnnnnnnnnnnnnnnnnnnnnnnnnnnnnnnnnnnnnnnnnnnnnnnnnnnnnnnnnnnnnnnnnnnnnnnnnnnnnnnnnnnnnnnnnnnnnnnnnnnnnnnnnnnnnnnnnnnnnnnnnnnnnnnnnnnnnnnnnnnnnnnnnnnnnnnnnnnnnnnnnnnnnnnnnnnnnnnnnnnnnnnnnnnnnnnnnnnnnnnnnnnnnnnnnnnnnnnnnnnnnnnnnnnnnnnnnnnnnnnnnnnnnnnnnnnnnnnnnnnnnnnnnnnnnnnnnnnnnnnnnnnnnnnnnnnnnnnnnnnnnnnnnnnnnnnnnnnnnnnnnnnnnnnnnnnnnnnnnnnnnnnnnnnnnnnnnnnnnnnnnnnnnnnnnnnnnnnnnnnnnnnnnnnnnnnnnnnnnnnnnnnnnnnnnnnnnnnnnnnnnnnnnnnnnnnnnnnnnnnnnnnnnnnnnnnnnnnnnnnnnnnnnnnnnnnnnnnnnnnnnnnnnnnnnnnnnnnnnnnnnnnnnnnnnnnnnnnnnnnnnnnnnnnnnnnnnnnnnnnnnnnnnnnnnnnnnnnnnnnnnnnnnnnnnnnnnnnnnnnnnnnnnnnnnnnnnnnnnnnnnnnnnnnnnnnnnnnnnnnnnnnnnnnnnnnnnnnnnnnnnnnnnnnnnnnnnnnnnnnnnnnnnnnnnnnnnnnnnnnnnnnnnnnnnnnnnnnnnnnnnnnnnnnnnnnnnnnnnnnnnnnnnnnnnnnnnnnnnnnnnnnnnnnnnnnnnnnnnnnnnnnnnnnnnnnnnnnnnnnnnnnnnnnnnnnnnnnnnnnnnnnnnnnnnnnnnnnnnnnnnnnnnnnnnnnnnnnnnnnnnnnnnnnnnnnnnnnnnnnnnnnnnnnnnnnnnnnnnnnnnnnnnnnnnnnnnnnnnnnnnnnnnnnnnnnnnnnnnnnnnnnnnnnnnnnnnnnnnnnnnnnnnnnnnnnnnnnnnnnnnnnnnnnnnnnnnnnnnnnnnnnnnnnnnnnnnnnnnnnnnnnnnnnnnnnnnnnnnnnnnnnnnnnnnnnnnnnnnnnnnnnnnnnnnnnnnnnnnnnnnnnnnnnnnnnnnnnnnnnnnnnnnnnnnnnnnnnnnnnnnnnnnnnnnnnnnnnnnnnnnnnnnnnnnnnnnnnnnnnnnnnnnnnnnnnnnnnnnnnnnnnnnnnnnnnnnnnnnnnnnnnnnnnnnnnnnnnnnnnnnnnnnnnnnnnnnnnnnnnnnnnnnnnnnnnnnnnnnnnnnnnnnnnnnnnnnnnnnnnnnnnnnnnnnnnnnnnnnnnnnnnnnnnnnnnnnnnnnnnnnnnnnnnnnnnnnnnnnnnnnnnnnnnnnnnnnnnnnnnnnnnnnnnnnnnnnnnnnnnnnnnnnnnnnnnnnnnnnnnnnnnnnnnnnnnnnnnnnnnnnnnnnnnnnnnnnnnnnnnnnnnnnnnnnnnnnnnnnnnnnnnnnnnnnnnnnnnnnnnnnnnnnnnnnnnnnnnnnnnnnnnnnnnnnnnnnnnnnnnnnnnnnnnnnnnnnnnnnnnnnnnnnnnnnnnnnnnnnnnnnnnnnnnnnnnnnnnnnnnnnnnnnnnnnnnnnnnnnnnnnnnnnnnnnnnnnnnnnnnnnnnnnnnnnnnnnnnnnnnnnnnnnnnnnnnnnnnnnnnnnnnnnnnnnnnnnnnnnnnnnnnnnnnnnnnnnnnnnnnnnnnnnnnnnnnnnnnnnnnnnnnnnnnnnnnnnnnnnnnnnnnnnnnnnnnnnnnnnnnnnnnnnnnnnnnnnnnnnnnnnnnnnnnnnnnnnnnnnnnnnnnnnnnnnnnnnnnnnnnnnnnnnnnnnnnnnnnnnnnnnnnnnnnnnnnnnnnnnnnnnnnnnnnnnnnnnnnnnnnnnnnnnnnnnnnnnnnnnnnnnnnnnnnnnnnnnnnnnnnnnnnnnnnnnnnnnnnnnnnnnnnnnnnnnnnnnnnnnnnnnnnnnnnnnnnnnnnnnnnnnnnnnnnnnnnnnnnnnnnnnnnnnnnnnnnnnnnnnnnnnnnnnnnnnnnnnnnnnnnnnnnnnnnnnnnnnnnnnnnnnnnnnnnnnnnnnnnnnnnnnnnnnnnnnnnnnnnnnnnnnnnnnnnnnnnnnnnnnnnnnnnnnnnnnnnnnnnnnnnnnnnnnnnnnnnnnnnnnnnnnnnnnnnnnnnnnnnnnnnnnnnnnnnnnnnnnnnnnnnnnnnnnnnnnnnnnnnnnnnnnnnnnnnnnnnnnnnnnnnnnnnnnnnnnnnnnnnnnnnnnnnnnnnnnnnnnnnnnnnnnnnnnnnnnnnnnnnnnnnnnnnnnnnnnnnnnnnnnnnnnnnnnnnnnnnnnnnnnnnnnnnnnnnnnnnnnnnnnnnnnnnnnnnnnnnnnnnnnnnnnnnnnnnnnnnnnnnnnnnnnnnnnnnnnnnnnnnnnnnnnnnnnnnnnnnnnnnnnnnnnnnnnnnnnnnnnnnnnnnnnnnnnnnnnnnnnnnnnnnnnnnnnnnnnnnnnnnnnnnnnnnnnnnnnnnnnnnnnnnnnnnnnnnnnnnnnnnnnnnnnnnnnnnnnnnnnnnnnnnnnnnnnnnnnnnnnnnnnnnnnnnnnnnnnnnnnnnnnnnnnnnnnnnnnnnnnnnnnnnnnnnnnnnnnnnnnnnnnnnnnnnnnnnnnnnnnnnnnnnnnnnnnnnnnnnnnnnnnnnnnnnnnnnnnnnnnnnnnnnnnnnnnnnnnnnnnnnnnnnnnnnnnnnnnnnnnnnnnnnnnnnnnnnnnnnnnnnnnnnnnnnnnnnnnnnnnnnnnnnnnnnnnnnnnnnnnnnnnnnnnnnnnnnnnnnnnnnnnnnnnnnnnnnnnnnnnnnnnnnnnnnnnnnnnnnnnnnnnnnnnnnnnnnnnnnnnnnnnnnnnnnnnnnnnnnnnnnnnnnnnnnnnnnnnnnnnnnnnnnnnnnnnnnnnnnnnnnnnnnnnnnnnnnnnnnnnnnnnnnnnnnnnnnnnnnnnnnnnnnnnnnnnnnnnnnnnnnnnnnnnnnnnnnnnnnnnnnnnnnnnnnnnnnnnnnnnnnnnnnnnnnnnnnnnnnnnnnnnnnnnnnnnnnnnnnnnnnnnnnnnnnnnnnnnnnnnnnnnnnnnnnnnnnnnnnnnnnnnnnnnnnnnnnnnnnnnnnnnnnnnnnnnnnnnnnnnnnnnnnnnnnnnnnnnnnnnnnnnnnnnnnnnnnnnnnnnnnnnnnnnnnnnnnnnnnnnnnnnnnnnnnnnnnnnnnnnnnnnnnnnnnnnnnnnnnnnnnnnnnnnnnnnnnnnnnnnnnnnnnnnnnnnnnnnnnnnnnnnnnnnnnnnnnnnnnnnnnnnnnnnnnnnnnnnnnnnnnnnnnnnnnnnnnnnnnnnnnnnnnnnnnnnnnnnnnnnnnnnnnnnnnnnnnnnnnnnnnnnnnnnnnnnnnnnnnnnnnnnnnnnnnnnnnnnnnnnnnnnnnnnnnnnnnnnnnnnnnnnnnnnnnnnnnnnnnnnnnnnnnnnnnnnnnnnnnnnnnnnnnnnnnnnnnnnnnnnnnnnnnnnnnnnnnnnnnnnnnnnnnnnnnnnnnnnnnnnnnnnnnnnnnnnnnnnnnnnnnnnnnnnnnnnnnnnnnnnnnnnnnnnnnnnnnnnnnnnnnnnnnnnnnnnnnnnnnnnnnnnnnnnnnnnnnnnnnnnnnnnnnnnnnnnnnnnnnnnnnnnnnnnnnnnnnnnnnnnnnnnnnnnnnnnnnnnnnnnnnnnnnnnnnnnnnnnnnnnnnnnnnnnnnnnnnnnnnnnnnnnnnnnnnnnnnnnnnnnnnnnnnnnnnnnnnnnnnnnnnnnnnnnnnnnnnnnnnnnnnnnnnnnnnnnnnnnnnnnnnnnnnnnnnnnnnnnnnnnnnnnnnnnnnnnnnnnnnnnnnnnnnnnnnnnnnnnnnnnnnnnnnnnnnnnnnnnnnnnnnnnnnnnnnnnnnnnnnnnnnnnnnnnnnnnnnnnnnnnnnnnnnnnnnnnnnnnnnnnnnnnnnnnnnnnnnnnnnnnnnnnnnnnnnnnnnnnnnnnnnnnnnnnnnnnnnnnnnnnnnnnnnnnnnnnnnnnnnnnnnnnnnnnnnnnnnnnnnnnnnnnnnnnnnnnnnnnnnnnnnnnnnnnnnnnnnnnnnnnnnnnnnnnnnnnnnnnnnnnnnnnnnnnnnnnnnnnnnnnnnnnnnnnnnnnnnnnnnnnnnnnnnnnnnnnnnnnnnnnnnnnnnnnnnnnnnnnnnnnnnnnnnnnnnnnnnnnnnnnnnnnnnnnnnnnnnnnnnnnnnnnnnnnnnnnnnnnnnnnnnnnnnnnnnnnnnnnnnnnnnnnnnnnnnnnnnnnnnnnnnnnnnnnnnnnnnnnnnnnnnnnnnnnnnnnnnnnnnnnnnnnnnnnnnnnnnnnnnnnnnnnnnnnnnnnnnnnnnnnnnnnnnnnnnnnnnnnnnnnnnnnnnnnnnnnnnnnnnnnnnnnnnnnnnnnnnnnnnnnnnnnnnnnnnnnnnnnnnnnnnnnnnnnnnnnnnnnnnnnnnnnnnnnnnnnnnnnnnnnnnnnnnnnnnnnnnnnnnnnnnnnnnnnnnnnnnnnnnnnnnnnnnnnnnnnnnnnnnnnnnnnnnnnnnnnnnnnnnnnnnnnnnnnnnnnnnnnnnnnnnnnnnnnnnnnnnnnnnnnnnnnnnnnnnnnnnnnnnnnnnnnnnnnnnnnnnnnnnnnnnnnnnnnnnnnnnnnnnnnnnnnnnnnnnnnnnnnnnnnnnnnnnnnnnnnnnnnnnnnnnnnnnnnnnnnnnnnnnnnnnnnnnnnnnnnnnnnnnnnnnnnnnnnnnnnnnnnnnnnnnnnnnnnnnnnnnnnnnnnnnnnnnnnnnnnnnnnnnnnnnnnnnnnnnnnnnnnnnnnnnnnnnnnnnnnnnnnnnnnnnnnnnnnnnnnnnnnnnnnnnnnnnnnnnnnnnnnnnnnnnnnnnnnnnnnnnnnnnnnnnnnnnnnnnnnnnnnnnnnnnnnnnnnnnnnnnnnnnnnnnnnnnnnnnnnnnnnnnnnnnnnnnnnnnnnnnnnnnnnnnnnnnnnnnnnnnnnnnnnnnnnnnnnnnnnnnnnnnnnnnnnnnnnnnnnnnnnnnnnnnnnnnnnnnnnnnnnnnnnnnnnnnnnnnnnnnnnnnnnnnnnnnnnnnnnnnnnnnnnnnnnnnnnnnnnnnnnnnnnnnnnnnnnnnnnnnnnnnnnnnnnnnnnnnnnnnnnnnnnnnnnnnnnnnnnnnnnnnnnnnnnnnnnnnnnnnnnnnnnnnnnnnnnnnnnnnnnnnnnnnnnnnnnnnnnnnnnnnnnnnnnnnnnnnnnnnnnnnnnnnnnnnnnnnnnnnnnnnnnnnnnnnnnnnnnnnnnnnnnnnnnnnnnnnnnnnnnnnnnnnnnnnnnnnnnnnnnnnnnnnnnnnnnnnnnnnnnnnnnnnnnnnnnnnnnnnnnnnnnnnnnnnnnnnnnnnnnnnnnnnnnnnnnnnnnnnnnnnnnnnnnnnnnnnnnnnnnnnnnnnnnnnnnnnnnnnnnnnnnnnnnnnnnnnnnnnnnnnnnnnnnnnnnnnnnnnnnnnnnnnnnnnnnnnnnnnnnnnnnnnnnnnnnnnnnnnnnnnnnnnnnnnnnnnnnnnnnnnnnnnnnnnnnnnnnnnnnnnnnnnnnnnnnnnnnnnnnnnnnnnnnnnnnnnnnnnnnnnnnnnnnnnnnnnnnnnnnnnnnnnnnnnnnnnnnnnnnnnnnnnnnnnnnnnnnnnnnnnnnnnnnnnnnnnnnnnnnnnnnnnnnnnnnnnnnnnnnnnnnnnnnnnnnnnnnnnnnnnnnnnnnnnnnnnnnnnnnnnnnnnnnnnnnnnnnnnnnnnnnnnnnnnnnnnnnnnnnnnnnnnnnnnnnnnnnnnnnnnnnnnnnnnnnnnnnnnnnnnnnnnnnnnnnnnnnnnnnnnnnnnnnnnnnnnnnnnnnnnnnnnnnnnnnnnnnnnnnnnnnnnnnnnnnnnnnnnnnnnnnnnnnnnnnnnnnnnnnnnnnnnnnnnnnnnnnnnnnnnnnnnnnnnnnnnnnnnnnnnnnnnnnnnnnnnnnnnnnnnnnnnnnnnnnnnnnnnnnnnnnnnnnnnnnnnnnnnnnnnnnnnnnnnnnnnnnnnnnnnnnnnnnnnnnnnnnnnnnnnnnnnnnnnnnnnnnnnnnnnnnnnnnnnnnnnnnnnnnnnnnnnnnnnnnnnnnnnnnnnnnnnnnnnnnnnnnnnnnnnnnnnnnnnnnnnnnnnnnnnnnnnnnnnnnnnnnnnnnnnnnnnnnnnnnnnnnnnnnnnnnnnnnnnnnnnnnnnnnnnnnnnnnnnnnnnnnnnnnnnnnnnnnnnnnnnnnnnnnnnnnnnnnnnnnnnnnnnnnnnnnnnnnnnnnnnnnnnnnnnnnnnnnnnnnnnnnnnnnnnnnnnnnnnnnnnnnnnnnnnnnnnnnnnnnnnnnnnnnnnnnnnnnnnnnnnnnnnnnnnnnnnnnnnnnnnnnnnnnnnnnnnnnnnnnnnnnnnnnnnnnnnnnnnnnnnnnnnnnnnnnnnnnnnnnnnnnnnnnnnnnnnnnnnnnnnnnnnnnnnnnnnnnnnnnnnnnnnnnnnnnnnnnnnnnnnnnnnnnnnnnnnnnnnnnnnnnnnnnnnnnnnnnnnnnnnnnnnnnnnnnnnnnnnnnnnnnnnnnnnnnnnnnnnnnnnnnnnnnnnnnnnnnnnnnnnnnnnnnnnnnnnnnnnnnnnnnnnnnnnnnnnnnnnnnnnnnnnnnnnnnnnnnnnnnnnnnnnnnnnnnnnnnnnnnnnnnnnnnnnnnnnnnnnnnnnnnnnnnnnnnnnnnnnnnnnnnnnnnnnnnnnnnnnnnnnnnnnnnnnnnnnnnnnnnnnnnnnnnnnnnnnnnnnnnnnnnnnnnnnnnnnnnnnnnnnnnnnnnnnnnnnnnnnnnnnnnnnnnnnnnnnnnnnnnnnnnnnnnnnnnnnnnnnnnnnnnnnnnnnnnnnnnnnnnnnnnnnnnnnnnnnnnnnnnnnnnnnnnnnnnnnnnnnnnnnnnnnnnnnnnnnnnnnnnnnnnnnnnnnnnnnnnnnnnnnnnnnnnnnnnnnnnnnnnnnnnnnnnnnnnnnnnnnnnnnnnnnnnnnnnnnnnnnnnnnnnnnnnnnnnnnnnnnnnnnnnnnnnnnnnnnnnnnnnnnnnnnnnnnnnnnnnnnnnnnnnnnnnnnnnnnnnnnnnnnnnnnnnnnnnnnnnnnnnnnnnnnnnnnnnnnnnnnnnnnnnnnnnnnnnnnnnnnnnnnnnnnnnnnnnnnnnnnnnnnnnnnnnnnnnnnnnnnnnnnnnnnnnnnnnnnnnnnnnnnnnnnnnnnnnnnnnnnnnnnnnnnnnnnnnnnnnnnnnnnnnnnnnnnnnnnnnnnnnnnnnnnnnnnnnnnnnnnnnnnnnnnnnnnnnnnnnnnnnnnnnnnnnnnnnnnnnnnnnnnnnnnnnnnnnnnnnnnnnnnnnnnnnnnnnnnnnnnnnnnnnnnnnnnnnnnnnnnnnnnnnnnnnnnnnnnnnnnnnnnnnnnnnnnnnnnnnnnnnnnnnnnnnnnnnnnnnnnnnnnnnnnnnnnnnnnnnnnnnnnnnnnnnnnnnnnnnnnnnnnnnnnnnnnnnnnnnnnnnnnnnnnnnnnnnnnnnnnnnnnnnnnnnnnnnnnnnnnnnnnnnnnnnnnnnnnnnnnnnnnnnnnnnnnnnnnnnnnnnnnnnnnnnnnnnnnnnnnnnnnnnnnnnnnnnnnnnnnnnnnnnnnnnnnnnnnnnnnnnnnnnnnnnnnnnnnnnnnnnnnnnnnnnnnnnnnnnnnnnnnnnnnnnnnnnnnnnnnnnnnnnnnnnnnnnnnnnnnnnnnnnnnnnnnnnnnnnnnnnnnnnnnnnnnnnnnnnnnnnnnnnnnnnnnnnnnnnnnnnnnnnnnnnnnnnnnnnnnnnnnnnnnnnnnnnnnnnnnnnnnnnnnnnnnnnnnnnnnnnnnnnnnnnnnnnnnnnnnnnnnnnnnnnnnnnnnnnnnnnnnnnnnnnnnnnnnnnnnnnnnnnnnnnnnnnnnnnnnnnnnnnnnnnnnnnnnnnnnnnnnnnnnnnnnnnnnnnnnnnnnnnnnnnnnnnnnnnnnnnnnnnnnnnnnnnnnnnnnnnnnnnnnnnnnnnnnnnnnnnnnnnnnnnnnnnnnnnnnnnnnnnnnnnnnnnnnnnnnnnnnnnnnnnnnnnnnnnnnnnnnnnnnnnnnnnnnnnnnnnnnnnnnnnnnnnnnnnnnnnnnnnnnnnnnnnnnnnnnnnnnnnnnnnnnnnnnnnnnnnnnnnnnnnnnnnnnnnnnnnnnnnnnnnnnnnnnnnnnnnnnnnnnnnnnnnnnnnnnnnnnnnnnnnnnnnnnnnnnnnnnnnnnnnnnnnnnnnnnnnnnnnnnnnnnnnnnnnnnnnnnnnnnnnnnnnnnnnnnnnnnnnnnnnnnnnnnnnnnnnnnnnnnnnnnnnnnnnnnnnnnnnnnnnnnnnnnnnnnnnnnnnnnnnnnnnnnnnnnnnnnnnnnnnnnnnnnnnnnnnnnnnnnnnnnnnnnnnnnnnnnnnnnnnnnnnnnnnnnnnnnnnnnnnnnnnnnnnnnnnnnnnnnnnnnnnnnnnnnnnnnnnnnnnnnnnnnnnnnnnnnnnnnnnnnnnnnnnnnnnnnnnnnnnnnnnnnnnnnnnnnnnnnnnnnnnnnnnnnnnnnnnnnnnnnnnnnnnnnnnnnnnnnnnnnnnnnnnnnnnnnnnnnnnnnnnnnnnnnnnnnnnnnnnnnnnnnnnnnnnnnnnnnnnnnnnnnnnnnnnnnnnnnnnnnnnnnnnnnnnnnnnnnnnnnnnnnnnnnnnnnnnnnnnnnnnnnnnnnnnnnnnnnnnnnnnnnnnnnnnnnnnnnnnnnnnnnnnnnnnnnnnnnnnnnnnnnnnnnnnnnnnnnnnnnnnnnnnnnnnnnnnnnnnnnnnnnnnnnnnnnnnnnnnnnnnnnnnnnnnnnnnnnnnnnnnnnnnnnnnnnnnnnnnnnnnnnnnnnnnnnnnnnnnnnnnnnnnnnnnnnnnnnnnnnnnnnnnnnnnnnnnnnnnnnnnnnnnnnnnnnnnnnnnnnnnnnnnnnnnnnnnnnnnnnnnnnnnnnnnnnnnnnnnnnnnnnnnnnnnnnnnnnnnnnnnnnnnnnnnnnnnnnnnnnnnnnnnnnnnnnnnnnnnnnnnnnnnnnnnnnnnnnnnnnnnnnnnnnnnnnnnnnnnnnnnnnnnnnnnnnnnnnnnnnnnnnnnnnnnnnnnnnnnnnnnnnnnnnnnnnnnnnnnnnnnnnnnnnnnnnnnnnnnnnnnnnnnnnnnnnnnnnnnnnnnnnnnnnnnnnnnnnnnnnnnnnnnnnnnnnnnnnnnnnnnnnnnnnnnnnnnnnnnnnnnnnnnnnnnnnnnnnnnnnnnnnnnnnnnnnnnnnnnnnnnnnnnnnnnnnnnnnnnnnnnnnnnnnnnnnnnnnnnnnnnnnnnnnnnnnnnnnnnnnnnnnnnnnnnnnnnnnnnnnnnnnnnnnnnnnnnnnnnnnnnnnnnnnnnnnnnnnnnnnnnnnnnnnnnnnnnnnnnnnnnnnnnnnnnnnnnnnnnnnnnnnnnnnnnnnnnnnnnnnnnnnnnnnnnnnnnnnnnnnnnnnnnnnnnnnnnnnnnnnnnnnnnnnnnnnnnnnnnnnnnnnnnnnnnnnnnnnnnnnnnnnnnnnnnnnnnnnnnnnnnnnnnnnnnnnnnnnnnnnnnnnnnnnnnnnnnnnnnnnnnnnnnnnnnnnnnnnnnnnnnnnnnnnnnnnnnnnnnnnnnnnnnnnnnnnnnnnnnnnnnnnnnnnnnnnnnnnnnnnnnnnnnnnnnnnnnnnnnnnnnnnnnnnnnnnnnnnnnnnnnnnnnnnnnnnnnnnnnnnnnnnnnnnnnnnnnnnnnnnnnnnnnnnnnnnnnnnnnnnnnnnnnnnnnnnnnnnnnnnnnnnnnnnnnnnnnnnnnnnnnnnnnnnnnnnnnnnnnnnnnnnnnnnnnnnnnnnnnnnnnnnnnnnnnnnnnnnnnnnnnnnnnnnnnnnnnnnnnnnnnnnnnnnnnnnnnnnnnnnnnnnnnnnnnnnnnnnnnnnnnnnnnnnnnnnnnnnnnnnnnnnnnnnnnnnnnnnnnnnnnnnnnnnnnnnnnnnnnnnnnnnnnnnnnnnnnnnnnnnnnnnnnnnnnnnnnnnnnnnnnnnnnnnnnnnnnnnnnnnnnnnnnnnnnnnnnnnnnnnnnnnnnnnnnnnnnnnnnnnnnnnnnnnnnnnnnnnnnnnnnnnnnnnnnnnnnnnnnnnnnnnnnnnnnnnnnnnnnnnnnnnnnnnnnnnnnnnnnnnnnnnnnnnnnnnnnnnnnnnnnnnnnnnnnnnnnnnnnnnnnnnnnnnnnnnnnnnnnnnnnnnnnnnnnnnnnnnnnnnnnnnnnnnnnnnnnnnnnnnnnnnnnnnnnnnnnnnnnnnnnnnnnnnnnnnnnnnnnnnnnnnnnnnnnnnnnnnnnnnnnnnnnnnnnnnnnnnnnnnnnnnnnnnnnnnnnnnnnnnnnnnnnnnnnnnnnnnnnnnnnnnnnnnnnnnnnnnnnnnnnnnnnnnnnnnnnnnnnnnnnnnnnnnnnnnnnnnnnnnnnnnnnnnnnnnnnnnnnnnnnnnnnnnnnnnnnnnnnnnnnnnnnnnnnnnnnnnnnnnnnnnnnnnnnnnnnnnnnnnnnnnnnnnnnnnnnnnnnnnnnnnnnnnnnnnnnnnnnnnnnnnnnnnnnnnnnnnnnnnnnnnnnnnnnnnnnnnnnnnnnnnnnnnnnnnnnnnnnnnnnnnnnnnnnnnnnnnnnnnnnnnnnnnnnnnnnnnnnnnnnnnnnnnnnnnnnnnnnnnnnnnnnnnnnnnnnnnnnnnnnnnnnnnnnnnnnnnnnnnnnnnnnnnnnnnnnnnnnnnnnnnnnnnnnnnnnnnnnnnnnnnnnnnnnnnnnnnnnnnnnnnnnnnnnnnnnnnnnnnnnnnnnnnnnnnnnnnnnnnnnnnnnnnnnnnnnnnnnnnnnnnnnnnnnnnnnnnnnnnnnnnnnnnnnnnnnnnnnnnnnnnnnnnnnnnnnnnnnnnnnnnnnnnnnnnnnnnnnnnnnnnnnnnnnnnnnnnnnnnnnnnnnnnnnnnnnnnnnnnnnnnnnnnnnnnnnnnnnnnnnnnnnnnnnnnnnnnnnnnnnnnnnnnnnnnnnnnnnnnnnnnnnnnnnnnnnnnnnnnnnnnnnnnnnnnnnnnnnnnnnnnnnnnnnnnnnnnnnnnnnnnnnnnnnnnnnnnnnnnnnnnnnnnnnnnnnnnnnnnnnnnnnnnnnnnnnnnnnnnnnnnnnnnnnnnnnnnnnnnnnnnnnnnnnnnnnnnnnnnnnnnnnnnnnnnnnnnnnnnnnnnnnnnnnnnnnnnnnnnnnnnnnnnnnnnnnnnnnnnnnnnnnnnnnnnnnnnnnnnnnnnnnnnnnnnnnnnnnnnnnnnnnnnnnnnnnnnnnnnnnnnnnnnnnnnnnnnnnnnnnnnnnnnnnnnnnnnnnnnnnnnnnnnnnnnnnnnnnnnnnnnnnnnnnnnnnnnnnnnnnnnnnnnnnnnnnnnnnnnnnnnnnnnnnnnnnnnnnnnnnnnnnnnnnnnnnnnnnnnnnnnnnnnnnnnnnnnnnnnnnnnnnnnnnnnnnnnnnnnnnnnnnnnnnnnnnnnnnnnnnnnnnnnnnnnnnnnnnnnnnnnnnnnnnnnnnnnnnnnnnnnnnnnnnnnnnnnnnnnnnnnnnnnnnnnnnnnnnnnnnnnnnnnnnnnnnnnnnnnnnnnnnnnnnnnnnnnnnnnnnnnnnnnnnnnnnnnnnnnnnnnnnnnnnnnnnnnnnnnnnnnnnnnnnnnnnnnnnnnnnnnnnnnnnnnnnnnnnnnnnnnnnnnnnnnnnnnnnnnnnnnnnnnnnnnnnnnnnnnnnnnnnnnnnnnnnnnnnnnnnnnnnnnnnnnnnnnnnnnnnnnnnnnnnnnnnnnnnnnnnnnnnnnnnnnnnnnnnnnnnnnnnnnnnnnnnnnnnnnnnnnnnnnnnnnnnnnnnnnnnnnnnnnnnnnnnnnnnnnnnnnnnnnnnnnnnnnnnnnnnnnnnnnnnnnnnnnnnnnnnnnnnnnnnnnnnnnnnnnnnnnnnnnnnnnnnnnnnnnnnnnnnnnnnnnnnnnnnnnnnnnnnnnnnnnnnnnnnnnnnnnnnnnnnnnnnnnnnnnnnnnnnnnnnnnnnnnnnnnnnnnnnnnnnnnnnnnnnnnnnnnnnnnnnnnnnnnnnnnnnnnnnnnnnnnnnnnnnnnnnnnnnnnnnnnnnnnnnnnnnnnnnnnnnnnnnnnnnnnnnnnnnnnnnnnnnnnnnnnnnnnnnnnnnnnnnnnnnnnnnnnnnnnnnnnnnnnnnnnnnnnnnnnnnnnnnnnnnnnnnnnnnnnnnnnnnnnnnnnnnnnnnnnnnnnnnnnnnnnnnnnnnnnnnnnnnnnnnnnnnnnnnnnnnnnnnnnnnnnnnnnnnnnnnnnnnnnnnnnnnnnnnnnnnnnnnnnnnnnnnnnnnnnnnnnnnnnnnnnnnnnnnnnnnnnnnnnnnnnnnnnnnnnnnnnnnnnnnnnnnnnnnnnnnnnnnnnnnnnnnnnnnnnnnnnnnnnnnnnnnnnnnnnnnnnnnnnnnnnnnnnnnnnnnnnnnnnnnnnnnnnnnnnnnnnnnnnnnnnnnnnnnnnnnnnnnnnnnnnnnnnnnnnnnnnnnnnnnnnnnnnnnnnnnnnnnnnnnnnnnnnnnnnnnnnnnnnnnnnnnnnnnnnnnnnnnnnnnnnnnnnnnnnnnnnnnnnnnnnnnnnnnnnnnnnnnnnnnnnnnnnnnnnnnnnnnnnnnnnnnnnnnnnnnnnnnnnnnnnnnnnnnnnnnnnnnnnnnnnnnnnnnnnnnnnnnnnnnnnnnnnnnnnnnnnnnnnnnnnnnnnnnnnnnnnnnnnnnnnnnnnnnnnnnnnnnnnnnnnnnnnnnnnnnnnnnnnnnnnnnnnnnnnnnnnnnnnnnnnnnnnnnnnnnnnnnnnnnnnnnnnnnnnnnnnnnnnnnnnnnnnnnnnnnnnnnnnnnnnnnnnnnnnnnnnnnnnnnnnnnnnnnnnnnnnnnnnnnnnnnnnnnnnnnnnnnnnnnnnnnnnnnnnnnnnnnnnnnnnnnnnnnnnnnnnnnnnnnnnnnnnnnnnnnnnnnnnnnnnnnnnnnnnnnnnnnnnnnnnnnnnnnnnnnnnnnnnnnnnnnnnnnnnnnnnnnnnnnnnnnnnnnnnnnnnnnnnnnnnnnnnnnnnnnnnnnnnnnnnnnnnnnnnnnnnnnnnnnnnnnnnnnnnnnnnnnnnnnnnnnnnnnnnnnnnnnnnnnnnnnnnnnnnnnnnnnnnnnnnnnnnnnnnnnnnnnnnnnnnnnnnnnnnnnnnnnnnnnnnnnnnnnnnnnnnnnnnnnnnnnnnnnnnnnnnnnnnnnnnnnnnnnnnnnnnnnnnnnnnnnnnnnnnnnnnnnnnnnnnnnnnnnnnnnnnnnnnnnnnnnnnnnnnnnnnnnnnnnnnnnnnnnnnnnnnnnnnnnnnnnnnnnnnnnnnnnnnnnnnnnnnnnnnnnnnnnnnnnnnnnnnnnnnnnnnnnnnnnnnnnnnnnnnnnnnnnnnnnnnnnnnnnnnnnnnnnnnnnnnnnnnnnnnnnnnnnnnnnnnnnnnnnnnnnnnnnnnnnnnnnnnnnnnnnnnnnnnnnnnnnnnnnnnnnnnnnnnnnnnnnnnnnnnnnnnnnnnnnnnnnnnnnnnnnnnnnnnnnnnnnnnnnnnnnnnnnnnnnnnnnnnnnnnnnnnnnnnnnnnnnnnnnnnnnnnnnnnnnnnnnnnnnnnnnnnnnnnnnnnnnnnnnnnnnnnnnnnnnnnnnnnnnnnnnnnnnnnnnnnnnnnnnnnnnnnnnnnnnnnnnnnnnnnnnnnnnnnnnnnnnnnnnnnnnnnnnnnnnnnnnnnnnnnnnnnnnnnnnnnnnnnnnnnnnnnnnnnnnnnnnnnnnnnnnnnnnnnnnnnnnnnnnnnnnnnnnnnnnnnnnnnnnnnnnnnnnnnnnnnnnnnnnnnnnnnnnnnnnnnnnnnnnnnnnnnnnnnnnnnnnnnnnnnnnnnnnnnnnnnnnnnnnnnnnnnnnnnnnnnnnnnnnnnnnnnnnnnnnnnnnnnnnnnnnnnnnnnnnnnnnnnnnnnnnnnnnnnnnnnnnnnnnnnnnnnnnnnnnnnnnnnnnnnnnnnnnnnnnnnnnnnnnnnnnnnnnnnnnnnnnnnnnnnnnnnnnnnnnnnnnnnnnnnnnnnnnnnnnnnnnnnnnnnnnnnnnnnnnnnnnnnnnnnnnnnnnnnnnnnnnnnnnnnnnnnnnnnnnnnnnnnnnnnnnnnnnnnnnnnnnnnnnnnnnnnnnnnnnnnnnnnnnnnnnnnnnnnnnnnnnnnnnnnnnnnnnnnnnnnnnnnnnnnnnnnnnnnnnnnnnnnnnnnnnnnnnnnnnnnnnnnnnnnnnnnnnnnnnnnnnnnnnnnnnnnnnnnnnnnnnnnnnnnnnnnnnnnnnnnnnnnnnnnnnnnnnnnnnnnnnnnnnnnnnnnnnnnnnnnnnnnnnnnnnnnnnnnnnnnnnnnnnnnnnnnnnnnnnnnnnnnnnnnnnnnnnnnnnnnnnnnnnnnnnnnnnnnnnnnnnnnnnnnnnnnnnnnnnnnnnnnnnnnnnnnnnnnnnnnnnnnnnnnnnnnnnnnnnnnnnnnnnnnnnnnnnnnnnnnnnnnnnnnnnnnnnnnnnnnnnnnnnnnnnnnnnnnnnnnnnnnnnnnnnnnnnnnnnnnnnnnnnnnnnnnnnnnnnnnnnnnnnnnnnnnnnnnnnnnnnnnnnnnnnnnnnnnnnnnnnnnnnnnnnnnnnnnnnnnnnnnnnnnnnnnnnnnnnnnnnnnnnnnnnnnnnnnnnnnnnnnnnnnnnnnnnnnnnnnnnnnnnnnnnnnnnnnnnnnnnnnnnnnnnnnnnnnnnnnnnnnnnnnnnnnnnnnnnnnnnnnnnnnnnnnnnnnnnnnnnnnnnnnnnnnnnnnnnnnnnnnnnnnnnnnnnnnnnnnnnnnnnnnnnnnnnnnnnnnnnnnnnnnnnnnnnnnnnnnnnnnnnnnnnnnnnnnnnnnnnnnnnnnnnnnnnnnnnnnnnnnnnnnnnnnnnnnnnnnnnnnnnnnnnnnnnnnnnnnnnnnnnnnnnnnnnnnnnnnnnnnnnnnnnnnnnnnnnnnnnnnnnnnnnnnnnnnnnnnnnnnnnnnnnnnnnnnnnnnnnnnnnnnnnnnnnnnnnnnnnnnnnnnnnnnnnnnnnnnnnnnnnnnnnnnnnnnnnnnnnnnnnnnnnnnnnnnnnnnnnnnnnnnnnnnnnnnnnnnnnnnnnnnnnnnnnnnnnnnnnnnnnnnnnnnnnnnnnnnnnnnnnnnnnnnnnnnnnnnnnnnnnnnnnnnnnnnnnnnnnnnnnnnnnnnnnnnnnnnnnnnnnnnnnnnnnnnnnnnnnnnnnnnnnnnnnnnnnnnnnnnnnnnnnnnnnnnnnnnnnnnnnnnnnnnnnnnnnnnnnnnnnnnnnnnnnnnnnnnnnnnnnnnnnnnnnnnnnnnnnnnnnnnnnnnnnnnnnnnnnnnnnnnnnnnnnnnnnnnnnnnnnnnnnnnnnnnnnnnnnnnnnnnnnnnnnnnnnnnnnnnnnnnnnnnnnnnnnnnnnnnnnnnnnnnnnnnnnnnnnnnnnnnnnnnnnnnnnnnnnnnnnnnnnnnnnnnnnnnnnnnnnnnnnnnnnnnnnnnnnnnnnnnnnnnnnnnnnnnnnnnnnnnnnnnnnnnnnnnnnnnnnnnnnnnnnnnnnnnnnnnnnnnnnnnnnnnnnnnnnnnnnnnnnnnnnnnnnnnnnnnnnnnnnnnnnnnnnnnnnnnnnnnnnnnnnnnnnnnnnnnnnnnnnnnnnnnnnnnnnnnnnnnnnnnnnnnnnnnnnnnnnnnnnnnnnnnnnnnnnnnnnnnnnnnnnnnnnnnnnnnnnnnnnnnnnnnnnnnnnnnnnnnnnnnnnnnnnnnnnnnnnnnnnnnnnnnnnnnnnnnnnnnnnnnnnnnnnnnnnnnnnnnnnnnnnnnnnnnnnnnnnnnnnnnnnnnnnnnnnnnnnnnnnnnnnnnnnnnnnnnnnnnnnnnnnnnnnnnnnnnnnnnnnnnnnnnnnnnnnnnnnnnnnnnnnnnnnnnnnnnnnnnnnnnnnnnnnnnnnnnnnnnnnnnnnnnnnnnnnnnnnnnnnnnnnnnnnnnnnnnnnnnnnnnnnnnnnnnnnnnnnnnnnnnnnnnnnnnnnnnnnnnnnnnnnnnnnnnnnnnnnnnnnnnnnnnnnnnnnnnnnnnnnnnnnnnnnnnnnnnnnnnnnnnnnnnnnnnnnnnnnnnnnnnnnnnnnnnnnnnnnnnnnnnnnnnnnnnnnnnnnnnnnnnnnnnnnnnnnnnnnnnnnnnnnnnnnnnnnnnnnnnnnnnnnnnnnnnnnnnnnnnnnnnnnnnnnnnnnnnnnnnnnnnnnnnnnnnnnnnnnnnnnnnnnnnnnnnnnnnnnnnnnnnnnnnnnnnnnnnnnnnnnnnnnnnnnnnnnnnnnnnnnnnnnnnnnnnnnnnnnnnnnnnnnnnnnnnnnnnnnnnnnnnnnnnnnnnnnnnnnnnnnnnnnnnnnnnnnnnnnnnnnnnnnnnnnnnnnnnnnnnnnnnnnnnnnnnnnnnnnnnnnnnnnnnnnnnnnnnnnnnnnnnnnnnnnnnnnnnnnnnnnnnnnnnnnnnnnnnnnnnnnnnnnnnnnnnnnnnnnnnnnnnnnnnnnnnnnnnnnnnnnnnnnnnnnnnnnnnnnnnnnnnnnnnnnnnnnnnnnnnnnnnnnnnnnnnnnnnnnnnnnnnnnnnnnnnnnnnnnnnnnnnnnnnnnnnnnnnnnnnnnnnnnnnnnnnnnnnnnnnnnnnnnnnnnnnnnnnnnnnnnnnnnnnnnnnnnnnnnnnnnnnnnnnnnnnnnnnnnnnnnnnnnnnnnnnnnnnnnnnnnnnnnnnnnnnnnnnnnnnnnnnnnnnnnnnnnnnnnnnnnnnnnnnnnnnnnnnnnnnnnnnnnnnnnnnnnnnnnnnnnnnnnnnnnnnnnnnnnnnnnnnnnnnnnnnnnnnnnnnnnnnnnnnnnnnnnnnnnnnnnnnnnnnnnnnnnnnnnnnnnnnnnnnnnnnnnnnnnnnnnnnnnnnnnnnnnnnnnnnnnnnnnnnnnnnnnnnnnnnnnnnnnnnnnnnnnnnnnnnnnnnnnnnnnnnnnnnnnnnnnnnnnnnnnnnnnnnnnnnnnnnnnnnnnnnnnnnnnnnnnnnnnnnnnnnnnnnnnnnnnnnnnnnnnnnnnnnnnnnnnnnnnnnnnnnnnnnnnnnnnnnnnnnnnnnnnnnnnnnnnnnnnnnnnnnnnnnnnnnnnnnnnnnnnnnnnnnnnnnnnnnnnnnnnnnnnnnnnnnnnnnnnnnnnnnnnnnnnnnnnnnnnnnnnnnnnnnnnnnnnnnnnnnnnnnnnnnnnnnnnnnnnnnnnnnnnnnnnnnnnnnnnnnnnnnnnnnnnnnnnnnnnnnnnnnnnnnnnnnnnnnnnnnnnnnnnnnnnnnnnnnnnnnnnnnnnnnnnnnnnnnnnnnnnnnnnnnnnnnnnnnnnnnnnnnnnnnnnnnnnnnnnnnnnnnnnnnnnnnnnnnnnnnnnnnnnnnnnnnnnnnnnnnnnnnnnnnnnnnnnnnnnnnnnnnnnnnnnnnnnnnnnnnnnnnnnnnnnnnnnnnnnnnnnnnnnnnnnnnnnnnnnnnnnnnnnnnnnnnnnnnnnnnnnnnnnnnnnnnnnnnnnnnnnnnnnnnnnnnnnnnnnnnnnnnnnnnnnnnnnnnnnnnnnnnnnnnnnnnnnnnnnnnnnnnnnnnnnnnnnnnnnnnnnnnnnnnnnnnnnnnnnnnnnnnnnnnnnnnnnnnnnnnnnnnnnnnnnnnnnnnnnnnnnnnnnnnnnnnnnnnnnnnnnnnnnnnnnnnnnnnnnnnnnnnnnnnnnnnnnnnnnnnnnnnnnnnnnnnnnnnnnnnnnnnnnnnnnnnnnnnnnnnnnnnnnnnnnnnnnnnnnnnnnnnnnnnnnnnnnnnnnnnnnnnnnnnnnnnnnnnnnnnnnnnnnnnnnnnnnnnnnnnnnnnnnnnnnnnnnnnnnnnnnnnnnnnnnnnnnnnnnnnnnnnnnnnnnnnnnnnnnnnnnnnnnnnnnnnnnnnnnnnnnnnnnnnnnnnnnnnnnnnnnnnnnnnnnnnnnnnnnnnnnnnnnnnnnnnnnnnnnnnnnnnnnnnnnnnnnnnnnnnnnnnnnnnnnnnnnnnnnnnnnnnnnnnnnnnnnnnnnnnnnnnnnnnnnnnnnnnnnnnnnnnnnnnnnnnnnnnnnnnnnnnnnnnnnnnnnnnnnnnnnnnnnnnnnnnnnnnnnnnnnnnnnnnnnnnnnnnnnnnnnnnnnnnnnnnnnnnnnnnnnnnnnnnnnnnnnnnnnnnnnnnnnnnnnnnnnnnnnnnnnnnnnnnnnnnnnnnnnnnnnnnnnnnnnnnnnnnnnnnnnnnnnnnnnnnnnnnnnnnnnnnnnnnnnnnnnnnnnnnnnnnnnnnnnnnnnnnnnnnnnnnnnnnnnnnnnnnnnnnnnnnnnnnnnnnnnnnnnnnnnnnnnnnnnnnnnnnnnnnnnnnnnnnnnnnnnnnnnnnnnnnnnnnnnnnnnnnnnnnnnnnnnnnnnnnnnnnnnnnnnnnnnnnnnnnnnnnnnnnnnnnnnnnnnnnnnnnnnnnnnnnnnnnnnnnnnnnnnnnnnnnnnnnnnnnnnnnnnnnnnnnnnnnnnnnnnnnnnnnnnnnnnnnnnnnnnnnnnnnnnnnnnnnnnnnnnnnnnnnnnnnnnnnnnnnnnnnnnnnnnnnnnnnnnnnnnnnnnnnnnnnnnnnnnnnnnnnnnnnnnnnnnnnnnnnnnnnnnnnnnnnnnnnnnnnnnnnnnnnnnnnnnnnnnnnnnnnnnnnnnnnnnnnnnnnnnnnnnnnnnnnnnnnnnnnnnnnnnnnnnnnnnnnnnnnnnnnnnnnnnnnnnnnnnnnnnnnnnnnnnnnnnnnnnnnnnnnnnnnnnnnnnnnnnnnnnnnnnnnnnnnnnnnnnnnnnnnnnnnnnnnnnnnnnnnnnnnnnnnnnnnnnnnnnnnnnnnnnnnnnnnnnnnnnnnnnnnnnnnnnnnnnnnnnnnnnnnnnnnnnnnnnnnnnnnnnnnnnnnnnnnnnnnnnnnnnnnnnnnnnnnnnnnnnnnnnnnnnnnnnnnnnnnnnnnnnnnnnnnnnnnnnnnnnnnnnnnnnnnnnnnnnnnnnnnnnnnnnnnnnnnnnnnnnnnnnnnnnnnnnnnnnnnnnnnnnnnnnnnnnnnnnnnnnnnnnnnnnnnnnnnnnnnnnnnnnnnnnnnnnnnnnnnnnnnnnnnnnnnnnnnnnnnnnnnnnnnnnnnnnnnnnnnnnnnnnnnnnnnnnnnnnnnnnnnnnnnnnnnnnnnnnnnnnnnnnnnnnnnnnnnnnnnnnnnnnnnnnnnnnnnnnnnnnnnnnnnnnnnnnnnnnnnnnnnnnnnnnnnnnnnnnnnnnnnnnnnnnnnnnnnnnnnnnnnnnnnnnnnnnnnnnnnnnnnnnnnnnnnnnnnnnnnnnnnnnnnnnnnnnnnnnnnnnnnnnnnnnnnnnnnnnnnnnnnnnnnnnnnnnnnnnnnnnnnnnnnnnnnnnnnnnnnnnnnnnnnnnnnnnnnnnnnnnnnnnnnnnnnnnnnnnnnnnnnnnnnnnnnnnnnnnnnnnnnnnnnnnnnnnnnnnnnnnnnnnnnnnnnnnnnnnnnnnnnnnnnnnnnnnnnnnnnnnnnnnnnnnnnnnnnnnnnnnnnnnnnnnnnnnnnnnnnnnnnnnnnnnnnnnnnnnnnnnnnnnnnnnnnnnnnnnnnnnnnnnnnnnnnnnnnnnnnnnnnnnnnnnnnnnnnnnnnnnnnnnnnnnnnnnnnnnnnnnnnnnnnnnnnnnnnnnnnnnnnnnnnnnnnnnnnnnnnnnnnnnnnnnnnnnnnnnnnnnnnnnnnnnnnnnnnnnnnnnnnnnnnnnnnnnnnnnnnnnnnnnnnnnnnnnnnnnnnnnnnnnnnnnnnnnnnnnnnnnnnnnnnnnnnnnnnnnnnnnnnnnnnnnnnnnnnnnnnnnnnnnnnnnnnnnnnnnnnnnnnnnnnnnnnnnnnnnnnnnnnnnnnnnnnnnnnnnnnnnnnnnnnnnnnnnnnnnnnnnnnnnnnnnnnnnnnnnnnnnnnnnnnnnnnnnnnnnnnnnnnnnnnnnnnnnnnnnnnnnnnnnnnnnnnnnnnnnnnnnnnnnnnnnnnnnnnnnnnnnnnnnnnnnnnnnnnnnnnnnnnnnnnnnnnnnnnnnnnnnnnnnnnnnnnnnnnnnnnnnnnnnnnnnnnnnnnnnnnnnnnnnnnnnnnnnnnnnnnnnnnnnnnnnnnnnnnnnnnnnnnnnnnnnnnnnnnnnnnnnnnnnnnnnnnnnnnnnnnnnnnnnnnnnnnnnnnnnnnnnnnnnnnnnnnnnnnnnnnnnnnnnnnnnnnnnnnnnnnnnnnnnnnnnnnnnnnnnnnnnnnnnnnnnnnnnnnnnnnnnnnnnnnnnnnnnnnnnnnnnnnnnnnnnnnnnnnnnnnnnnnnnnnnnnnnnnnnnnnnnnnnnnnnnnnnnnnnnnnnnnnnnnnnnnnnnnnnnnnnnnnnnnnnnnnnnnnnnnnnnnnnnnnnnnnnnnnnnnnnnnnnnnnnnnnnnnnnnnnnnnnnnnnnnnnnnnnnnnnnnnnnnnnnnnnnnnnnnnnnnnnnnnnnnnnnnnnnnnnnnnnnnnnnnnnnnnnnnnnnnnnnnnnnnnnnnnnnnnnnnnnnnnnnnnnnnnnnnnnnnnnnnnnnnnnnnnnnnnnnnnnnnnnnnnnnnnnnnnnnnnnnnnnnnnnnnnnnnnnnnnnnnnnnnnnnnnnnnnnnnnnnnnnnnnnnnnnnnnnnnnnnnnnnnnnnnnnnnnnnnnnnnnnnnnnnnnnnnnnnnnnnnnnnnnnnnnnnnnnnnnnnnnnnnnnnnnnnnnnnnnnnnnnnnnnnnnnnnnnnnnnnnnnnnnnnnnnnnnnnnnnnnnnnnnnnnnnnnnnnnnnnnnnnnnnnnnnnnnnnnnnnnnnnnnnnnnnnnnnnnnnnnnnnnnnnnnnnnnnnnnnnnnnnnnnnnnnnnnnnnnnnnnnnnnnnnnnnnnnnnnnnnnnnnnnnnnnnnnnnnnnnnnnnnnnnnnnnnnnnnnnnnnnnnnnnnnnnnnnnnnnnnnnnnnnnnnnnnnnnnnnnnnnnnnnnnnnnnnnnnnnnnnnnnnnnnnnnnnnnnnnnnnnnnnnnnnnnnnnnnnnnnnnnnnnnnnnnnnnnnnnnnnnnnnnnnnnnnnnnnnnnnnnnnnnnnnnnnnnnnnnnnnnnnnnnnnnnnnnnnnnnnnnnnnnnnnnnnnnnnnnnnnnnnnnnnnnnnnnnnnnnnnnnnnnnnnnnnnnnnnnnnnnnnnnnnnnnnnnnnnnnnnnnnnnnnnnnnnnnnnnnnnnnnnnnnnnnnnnnnnnnnnnnnnnnnnnnnnnnnnnnnnnnnnnnnnnnnnnnnnnnnnnnnnnnnnnnnnnnnnnnnnnnnnnnnnnnnnnnnnnnnnnnnnnnnnnnnnnnnnnnnnnnnnnnnnnnnnnnnnnnnnnnnnnnnnnnnnnnnnnnnnnnnnnnnnnnnnnnnnnnnnnnnnnnnnnnnnnnnnnnnnnnnnnnnnnnnnnnnnnnnnnnnnnnnnnnnnnnnnnnnnnnnnnnnnnnnnnnnnnnnnnnnnnnnnnnnnnnnnnnnnnnnnnnnnnnnnnnnnnnnnnnnnnnnnnnnnnnnnnnnnnnnnnnnnnnnnnnnnnnnnnnnnnnnnnnnnnnnnnnnnnnnnnnnnnnnnnnnnnnnnnnnnnnnnnnnnnnnnnnnnnnnnnnnnnnnnnnnnnnnnnnnnnnnnnnnnnnnnnnnnnnnnnnnnnnnnnnnnnnnnnnnnnnnnnnnnnnnnnnnnnnnnnnnnnnnnnnnnnnnnnnnnnnnnnnnnnnnnnnnnnnnnnnnnnnnnnnnnnnnnnnnnnnnnnnnnnnnnnnnnnnnnnnnnnnnnnnnnnnnnnnnnnnnnnnnnnnnnnnnnnnnnnnnnnnnnnnnnnnnnnnnnnnnnnnnnnnnnnnnnnnnnnnnnnnnnnnnnnnnnnnnnnnnnnnnnnnnnnnnnnnnnnnnnnnnnnnnnnnnnnnnnnnnnnnnnnnnnnnnnnnnnnnnnnnnnnnnnnnnnnnnnnnnnnnnnnnnnnnnnnnnnnnnnnnnnnnnnnnnnnnnnnnnnnnnnnnnnnnnnnnnnnnnnnnnnnnnnnnnnnnnnnnnnnnnnnnnnnnnnnnnnnnnnnnnnnnnnnnnnnnnnnnnnnnnnnnnnnnnnnnnnnnnnnnnnnnnnnnnnnnnnnnnnnnnnnnnnnnnnnnnnnnnnnnnnnnnnnnnnnnnnnnnnnnnnnnnnnnnnnnnnnnnnnnnnnnnnnnnnnnnnnnnnnnnnnnnnnnnnnnnnnnnnnnnnnnnnnnnnnnnnnnnnnnnnnnnnnnnnnnnnnnnnnnnnnnnnnnnnnnnnnnnnnnnnnnnnnnnnnnnnnnnnnnnnnnnnnnnnnnnnnnnnnnnnnnnnnnnnnnnnnnnnnnnnnnnnnnnnnnnnnnnnnnnnnnnnnnnnnnnnnnnnnnnnnnnnnnnnnnnnnnnnnnnnnnnnnnnnnnnnnnnnnnnnnnnnnnnnnnnnnnnnnnnnnnnnnnnnnnnnnnnnnnnnnnnnnnnnnnnnnnnnnnnnnnnnnnnnnnnnnnnnnnnnnnnnnnnnnnnnnnnnnnnnnnnnnnnnnnnnnnnnnnnnnnnnnnnnnnnnnnnnnnnnnnnnnnnnnnnnnnnnnnnnnnnnnnnnnnnnnnnnnnnnnnnnnnnnnnnnnnnnnnnnnnnnnnnnnnnnnnnnnnnnnnnnnnnnnnnnnnnnnnnnnnnnnnnnnnnnnnnnnnnnnnnnnnnnnnnnnnnnnnnnnnnnnnnnnnnnnnnnnnnnnnnnnnnnnnnnnnnnnnnnnnnnnnnnnnnnnnnnnnnnnnnnnnnnnnnnnnnnnnnnnnnnnnnnnnnnnnnnnnnnnnnnnnnnnnnnnnnnnnnnnnnnnnnnnnnnnnnnnnnnnnnnnnnnnnnnnnnnnnnnnnnnnnnnnnnnnnnnnnnnnnnnnnnnnnnnnnnnnnnnnnnnnnnnnnnnnnnnnnnnnnnnnnnnnnnnnnnnnnnnnnnnnnnnnnnnnnnnnnnnnnnnnnnnnnnnnnnnnnnnnnnnnnnnnnnnnnnnnnnnnnnnnnnnnnnnnnnnnnnnnnnnnnnnnnnnnnnnnnnnnnnnnnnnnnnnnnnnnnnnnnnnnnnnnnnnnnnnnnnnnnnnnnnnnnnnnnnnnnnnnnnnnnnnnnnnnnnnnnnnnnnnnnnnnnnnnnnnnnnnnnnnnnnnnnnnnnnnnnnnnnnnnnnnnnnnnnnnnnnnnnnnnnnnnnnnnnnnnnnnnnnnnnnnnnnnnnnnnnnnnnnnnnnnnnnnnnnnnnnnnnnnnnnnnnnnnnnnnnnnnnnnnnnnnnnnnnnnnnnnnnnnnnnnnnnnnnnnnnnnnnnnnnnnnnnnnnnnnnnnnnnnnnnnnnnnnnnnnnnnnnnnnnnnnnnnnnnnnnnnnnnnnnnnnnnnnnnnnnnnnnnnnnnnnnnnnnnnnnnnnnnnnnnnnnnnnnnnnnnnnnnnnnnnnnnnnnnnnnnnnnnnnnnnnnnnnnnnnnnnnnnnnnnnnnnnnnnnnnnnnnnnnnnnnnnnnnnnnnnnnnnnnnnnnnnnnnnnnnnnnnnnnnnnnnnnnnnnnnnnnnnnnnnnnnnnnnnnnnnnnnnnnnnnnnnnnnnnnnnnnnnnnnnnnnnnnnnnnnnnnnnnnnnnnnnnnnnnnnnnnnnnnnnnnnnnnnnnnnnnnnnnnnnnnnnnnnnnnnnnnnnnnnnnnnnnnnnnnnnnnnnnnnnnnnnnnnnnnnnnnnnnnnnnnnnnnnnnnnnnnnnnnnnnnnnnnnnnnnnnnnnnnnnnnnnnnnnnnnnnnnnnnnnnnnnnnnnnnnnnnnnnnnnnnnnnnnnnnnnnnnnnnnnnnnnnnnnnnnnnnnnnnnnnnnnnnnnnnnnnnnnnnnnnnnnnnnnnnnnnnnnnnnnnnnnnnnnnnnnnnnnnnnnnnnnnnnnnnnnnnnnnnnnnnnnnnnnnnnnnnnnnnnnnnnnnnnnnnnnnnnnnnnnnnnnnnnnnnnnnnnnnnnnnnnnnnnnnnnnnnnnnnnnnnnnnnnnnnnnnnnnnnnnnnnnnnnnnnnnnnnnnnnnnnnnnnnnnnnnnnnnnnnnnnnnnnnnnnnnnnnnnnnnnnnnnnnnnnnnnnnnnnnnnnnnnnnnnnnnnnnnnnnnnnnnnnnnnnnnnnnnnnnnnnnnnnnnnnnnnnnnnnnnnnnnnnnnnnnnnnnnnnnnnnnnnnnnnnnnnnnnnnnnnnnnnnnnnnnnnnnnnnnnnnnnnnnnnnnnnnnnnnnnnnnnnnnnnnnnnnnnnnnnnnnnnnnnnnnnnnnnnnnnnnnnnnnnnnnnnnnnnnnnnnnnnnnnnnnnnnnnnnnnnnnnnnnnnnnnnnnnnnnnnnnnnnnnnnnnnnnnnnnnnnnnnnnnnnnnnnnnnnnnnnnnnnnnnnnnnnnnnnnnnnnnnnnnnnnnnnnnnnnnnnnnnnnnnnnnnnnnnnnnnnnnnnnnnnnnnnnnnnnnnnnnnnnnnnnnnnnnnnnnnnnnnnnnnnnnnnnnnnnnnnnnnnnnnnnnnnnnnnnnnnnnnnnnnnnnnnnnnnnnnnnnnnnnnnnnnnnnnnnnnnnnnnnnnnnnnnnnnnnnnnnnnnnnnnnnnnnnnnnnnnnnnnnnnnnnnnnnnnnnnnnnnnnnnnnnnnnnnnnnnnnnnnnnnnnnnnnnnnnnnnnnnnnnnnnnnnnnnnnnnnnnnnnnnnnnnnnnnnnnnnnnnnnnnnnnnnnnnnnnnnnnnnnnnnnnnnnnnnnnnnnnnnnnnnnnnnnnnnnnnnnnnnnnnnnnnnnnnnnnnnnnnnnnnnnnnnnnnnnnnnnnnnnnnnnnnnnnnnnnnnnnnnnnnnnnnnnnnnnnnnnnnnnnnnnnnnnnnnnnnnnnnnnnnnnnnnnnnnnnnnnnnnnnnnnnnnnnnnnnnnnnnnnnnnnnnnnnnnnnnnnnnnnnnnnnnnnnnnnnnnnnnnnnnnnnnnnnnnnnnnnnnnnnnnnnnnnnnnnnnnnnnnnnnnnnnnnnnnnnnnnnnnnnnnnnnnnnnnnnnnnnnnnnnnnnnnnnnnnnnnnnnnnnnnnnnnnnnnnnnnnnnnnnnnnnnnnnnnnnnnnnnnnnnnnnnnnnnnnnnnnnnnnnnnnnnnnnnnnnnnnnnnnnnnnnnnnnnnnnnnnnnnnnnnnnnnnnnnnnnnnnnnnnnnnnnnnnnnnnnnnnnnnnnnnnnnnnnnnnnnnnnnnnnnnnnnnnnnnnnnnnnnnnnnnnnnnnnnnnnnnnnnnnnnnnnnnnnnnnnnnnnnnnnnnnnnnnnnnnnnnnnnnnnnnnnnnnnnnnnnnnnnnnnnnnnnnnnnnnnnnnnnnnnnnnnnnnnnnnnnnnnnnnnnnnnnnnnnnnnnnnnnnnnnnnnnnnnnnnnnnnnnnnnnnnnnnnnnnnnnnnnnnnnnnnnnnnnnnnnnnnnnnnnnnnnnnnnnnnnnnnnnnnnnnnnnnnnnnnnnnnnnnnnnnnnnnnnnnnnnnnnnnnnnnnnnnnnnnnnnnnnnnnnnnnnnnnnnnnnnnnnnnnnnnnnnnnnnnnnnnnnnnnnnnnnnnnnnnnnnnnnnnnnnnnnnnnnnnnnnnnnnnnnnnnnnnnnnnnnnnnnnnnnnnnnnnnnnnnnnnnnnnnnnnnnnnnnnnnnnnnnnnnnnnnnnnnnnnnnnnnnnnnnnnnnnnnnnnnnnnnnnnnnnnnnnnnnnnnnnnnnnnnnnnnnnnnnnnnnnnnnnnnnnnnnnnnnnnnnnnnnnnnnnnnnnnnnnnnnnnnnnnnnnnnnnnnnnnnnnnnnnnnnnnnnnnnnnnnnnnnnnnnnnnnnnnnnnnnnnnnnnnnnnnnnnnnnnnnnnnnnnnnnnnnnnnnnnnnnnnnnnnnnnnnnnnnnnnnnnnnnnnnnnnnnnnnnnnnnnnnnnnnnnnnnnnnnnnnnnnnnnnnnnnnnnnnnnnnnnnnnnnnnnnnnnnnnnnnnnnnnnnnnnnnnnnnnnnnnnnnnnnnnnnnnnnnnnnnnnnnnnnnnnnnnnnnnnnnnnnnnnnnnnnnnnnnnnnnnnnnnnnnnnnnnnnnnnnnnnnnnnnnnnnnnnnnnnnnnnnnnnnnnnnnnnnnnnnnnnnnnnnnnnnnnnnnnnnnnnnnnnnnnnnnnnnnnnnnnnnnnnnnnnnnnnnnnnnnnnnnnnnnnnnnnnnnnnnnnnnnnnnnnnnnnnnnnnnnnnnnnnnnnnnnnnnnnnnnnnnnnnnnnnnnnnnnnnnnnnnnnnnnnnnnnnnnnnnnnnnnnnnnnnnnnnnnnnnnnnnnnnnnnnnnnnnnnnnnnnnnnnnnnnnnnnnnnnnnnnnnnnnnnnnnnnnnnnnnnnnnnnnnnnnnnnnnnnnnnnnnnnnnnnnnnnnnnnnnnnnnnnnnnnnnnnnnnnnnnnnnnnnnnnnnnnnnnnnnnnnnnnnnnnnnnnnnnnnnnnnnnnnnnnnnnnnnnnnnnnnnnnnnnnnnnnnnnnnnnnnnnnnnnnnnnnnnnnnnnnnnnnnnnnnnnnnnnnnnnnnnnnnnnnnnnnnnnnnnnnnnnnnnnnnnnnnnnnnnnnnnnnnnnnnnnnnnnnnnnnnnnnnnnnnnnnnnnnnnnnnnnnnnnnnnnnnnnnnnnnnnnnnnnnnnnnnnnnnnnnnnnnnnnnnnnnnnnnnnnnnnnnnnnnnnnnnnnnnnnnnnnnnnnnnnnnnnnnnnnnnnnnnnnnnnnnnnnnnnnnnnnnnnnnnnnnnnnnnnnnnnnnnnnnnnnnnnnnnnnnnnnnnnnnnnnnnnnnnnnnnnnnnnnnnnnnnnnnnnnnnnnnnnnnnnnnnnnnnnnnnnnnnnnnnnnnnnnnnnnnnnnnnnnnnnnnnnnnnnnnnnnnnnnnnnnnnnnnnnnnnnnnnnnnnnnnnnnnnnnnnnnnnnnnnnnnnnnnnnnnnnnnnnnnnnnnnnnnnnnnnnnnnnnnnnnnnnnnnnnnnnnnnnnnnnnnnnnnnnnnnnnnnnnnnnnnnnnnnnnnnnnnnnnnnnnnnnnnnnnnnnnnnnnnnnnnnnnnnnnnnnnnnnnnnnnnnnnnnnnnnnnnnnnnnnnnnnnnnnnnnnnnnnnnnnnnnnnnnnnnnnnnnnnnnnnnnnnnnnnnnnnnnnnnnnnnnnnnnnnnnnnnnnnnnnnnnnnnnnnnnnnnnnnnnnnnnnnnnnnnnnnnnnnnnnnnnnnnnnnnnnnnnnnnnnnnnnnnnnnnnnnnnnnnnnnnnnnnnnnnnnnnnnnnnnnnnnnnnnnnnnnnnnnnnnnnnnnnnnnnnnnnnnnnnnnnnnnnnnnnnnnnnnnnnnnnnnnnnnnnnnnnnnnnnnnnnnnnnnnnnnnnnnnnnnnnnnnnnnnnnnnnnnnnnnnnnnnnnnnnnnnnnnnnnnnnnnnnnnnnnnnnnnnnnnnnnnnnnnnnnnnnnnnnnnnnnnnnnnnnnnnnnnnnnnnnnnnnnnnnnnnnnnnnnnnnnnnnnnnnnnnnnnnnnnnnnnnnnnnnnnnnnnnnnnnnnnnnnnnnnnnnnnnnnnnnnnnnnnnnnnnnnnnnnnnnnnnnnnnnnnnnnnnnnnnnnnnnnnnnnnnnnnnnnnnnnnnnnnnnnnnnnnnnnnnnnnnnnnnnnnnnnnnnnnnnnnnnnnnnnnnnnnnnnnnnnnnnnnnnnnnnnnnnnnnnnnnnnnnnnnnnnnnnnnnnnnnnnnnnnnnnnnnnnnnnnnnnnnnnnnnnnnnnnnnnnnnnnnnnnnnnnnnnnnnnnnnnnnnnnnnnnnnnnnnnnnnnnnnnnnnnnnnnnnnnnnnnnnnnnnnnnnnnnnnnnnnnnnnnnnnnnnnnnnnnnnnnnnnnnnnnnnnnnnnnnnnnnnnnnnnnnnnnnnnnnnnnnnnnnnnnnnnnnnnnnnnnnnnnnnnnnnnnnnnnnnnnnnnnnnnnnnnnnnnnnnnnnnnnnnnnnnnnnnnnnnnnnnnnnnnnnnnnnnnnnnnnnnnnnnnnnnnnnnnnnnnnnnnnnnnnnnnnnnnnnnnnnnnnnnnnnnnnnnnnnnnnnnnnnnnnnnnnnnnnnnnnnnnnnnnnnnnnnnnnnnnnnnnnnnnnnnnnnnnnnnnnnnnnnnnnnnnnnnnnnnnnnnnnnnnnnnnnnnnnnnnnnnnnnnnnnnnnnnnnnnnnnnnnnnnnnnnnnnnnnnnnnnnnnnnnnnnnnnnnnnnnnnnnnnnnnnnnnnnnnnnnnnnnnnnnnnnnnnnnnnnnnnnnnnnnnnnnnnnnnnnnnnnnnnnnnnnnnnnnnnnnnnnnnnnnnnnnnnnnnnnnnnnnnnnnnnnnnnnnnnnnnnnnnnnnnnnnnnnnnnnnnnnnnnnnnnnnnnnnnnnnnnnnnnnnnnnnnnnnnnnnnnnnnnnnnnnnnnnnnnnnnnnnnnnnnnnnnnnnnnnnnnnnnnnnnnnnnnnnnnnnnnnnnnnnnnnnnnnnnnnnnnnnnnnnnnnnnnnnnnnnnnnnnnnnnnnnnnnnnnnnnnnnnnnnnnnnnnnnnnnnnnnnnnnnnnnnnnnnnnnnnnnnnnnnnnnnnnnnnnnnnnnnnnnnnnnnnnnnnnnnnnnnnnnnnnnnnnnnnnnnnnnnnnnnnnnnnnnnnnnnnnnnnnnnnnnnnnnnnnnnnnnnnnnnnnnnnnnnnnnnnnnnnnnnnnnnnnnnnnnnnnnnnnnnnnnnnnnnnnnnnnnnnnnnnnnnnnnnnnnnnnnnnnnnnnnnnnnnnnnnnnnnnnnnnnnnnnnnnnnnnnnnnnnnnnnnnnnnnnnnnnnnnnnnnnnnnnnnnnnnnnnnnnnnnnnnnnnnnnnnnnnnnnnnnnnnnnnnnnnnnnnnnnnnnnnnnnnnnnnnnnnnnnnnnnnnnnnnnnnnnnnnnnnnnnnnnnnnnnnnnnnnnnnnnnnnnnnnnnnnnnnnnnnnnnnnnnnnnnnnnnnnnnnnnnnnnnnnnnnnnnnnnnnnnnnnnnnnnnnnnnnnnnnnnnnnnnnnnnnnnnnnnnnnnnnnnnnnnnnnnnnnnnnnnnnnnnnnnnnnnnnnnnnnnnnnnnnnnnnnnnnnnnnnnnnnnnnnnnnnnnnnnnnnnnnnnnnnnnnnnnnnnnnnnnnnnnnnnnnnnnnnnnnnnnnnnnnnnnnnnnnnnnnnnnnnnnnnnnnnnnnnnnnnnnnnnnnnnnnnnnnnnnnnnnnnnnnnnnnnnnnnnnnnnnnnnnnnnnnnnnnnnnnnnnnnnnnnnnnnnnnnnnnnnnnnnnnnnnnnnnnnnnnnnnnnnnnnnnnnnnnnnnnnnnnnnnnnnnnnnnnnnnnnnnnnnnnnnnnnnnnnnnnnnnnnnnnnnnnnnnnnnnnnnnnnnnnnnnnnnnnnnnnnnnnnnnnnnnnnnnnnnnnnnnnnnnnnnnnnnnnnnnnnnnnnnnnnnnnnnnnnnnnnnnnnnnnnnnnnnnnnnnnnnnnnnnnnnnnnnnnnnnnnnnnnnnnnnnnnnnnnnnnnnnnnnnnnnnnnnnnnnnnnnnnnnnnnnnnnnnnnnnnnnnnnnnnnnnnnnnnnnnnnnnnnnnnnnnnnnnnnnnnnnnnnnnnnnnnnnnnnnnnnnnnnnnnnnnnnnnnnnnnnnnnnnnnnnnnnnnnnnnnnnnnnnnnnnnnnnnnnnnnnnnnnnnnnnnnnnnnnnnnnnnnnnnnnnnnnnnnnnnnnnnnnnnnnnnnnnnnnnnnnnnnnnnnnnnnnnnnnnnnnnnnnnnnnnnnnnnnnnnnnnnnnnnnnnnnnnnnnnnnnnnnnnnnnnnnnnnnnnnnnnnnnnnnnnnnnnnnnnnnnnnnnnnnnnnnnnnnnnnnnnnnnnnnnnnnnnnnnnnnnnnnnnnnnnnnnnnnnnnnnnnnnnnnnnnnnnnnnnnnnnnnnnnnnnnnnnnnnnnnnnnnnnnnnnnnnnnnnnnnnnnnnnnnnnnnnnnnnnnnnnnnnnnnnnnnnnnnnnnnnnnnnnnnnnnnnnnnnnnnnnnnnnnnnnnnnnnnnnnnnnnnnnnnnnnnnnnnnnnnnnnnnnnnnnnnnnnnnnnnnnnnnnnnnnnnnnnnnnnnnnnnnnnnnnnnnnnnnnnnnnnnnnnnnnnnnnnnnnnnnnnnnnnnnnnnnnnnnnnnnnnnnnnnnnnnnnnnnnnnnnnnnnnnnnnnnnnnnnnnnnnnnnnnnnnnnnnnnnnnnnnnnnnnnnnnnnnnnnnnnnnnnnnnnnnnnnnnnnnnnnnnnnnnnnnnnnnnnnnnnnnnnnnnnnnnnnnnnnnnnnnnnnnnnnnnnnnnnnnnnnnnnnnnnnnnnnnnnnnnnnnnnnnnnnnnnnnnnnnnnnnnnnnnnnnnnnnnnnnnnnnnnnnnnnnnnnnnnnnnnnnnnnnnnnnnnnnnnnnnnnnnnnnnnnnnnnnnnnnnnnnnnnnnnnnnnnnnnnnnnnnnnnnnnnnnnnnnnnnnnnnnnnnnnnnnnnnnnnnnnnnnnnnnnnnnnnnnnnnnnnnnnnnnnnnnnnnnnnnnnnnnnnnnnnnnnnnnnnnnnnnnnnnnnnnnnnnnnnnnnnnnnnnnnnnnnnnnnnnnnnnnnnnnnnnnnnnnnnnnnnnnnnnnnnnnnnnnnnnnnnnnnnnnnnnnnnnnnnnnnnnnnnnnnnnnnnnnnnnnnnnnnnnnnnnnnnnnnnnnnnnnnnnnnnnnnnnnnnnnnnnnnnnnnnnnnnnnnnnnnnnnnnnnnnnnnnnnnnnnnnnnnnnnnnnnnnnnnnnnnnnnnnnnnnnnnnnnnnnnnnnnnnnnnnnnnnnnnnnnnnnnnnnnnnnnnnnnnnnnnnnnnnnnnnnnnnnnnnnnnnnnnnnnnnnnnnnnnnnnnnnnnnnnnnnnnnnnnnnnnnnnnnnnnnnnnnnnnnnnnnnnnnnnnnnnnnnnnnnnnnnnnnnnnnnnnnnnnnnnnnnnnnnnnnnnnnnnnnnnnnnnnnnnnnnnnnnnnnnnnnnnnnnnnnnnnnnnnnnnnnnnnnnnnnnnnnnnnnnnnnnnnnnnnnnnnnnnnnnnnnnnnnnnnnnnnnnnnnnnnnnnnnnnnnnnnnnnnnnnnnnnnnnnnnnnnnnnnnnnnnnnnnnnnnnnnnnnnnnnnnnnnnnnnnnnnnnnnnnnnnnnnnnnnnnnnnnnnnnnnnnnnnnnnnnnnnnnnnnnnnnnnnnnnnnnnnnnnnnnnnnnnnnnnnnnnnnnnnnnnnnnnnnnnnnnnnnnnnnnnnnnnnnnnnnnnnnnnnnnnnnnnnnnnnnnnnnnnnnnnnnnnnnnnnnnnnnnnnnnnnnnnnnnnnnnnnnnnnnnnnnnnnnnnnnnnnnnnnnnnnnnnnnnnnnnnnnnnnnnnnnnnnnnnnnnnnnnnnnnnnnnnnnnnnnnnnnnnnnnnnnnnnnnnnnnnnnnnnnnnnnnnnnnnnnnnnnnnnnnnnnnnnnnnnnnnnnnnnnnnnnnnnnnnnnnnnnnnnnnnnnnnnnnnnnnnnnnnnnnnnnnnnnnnnnnnnnnnnnnnnnnnnnnnnnnnnnnnnnnnnnnnnnnnnnnnnnnnnnnnnnnnnnnnnnnnnnnnnnnnnnnnnnnnnnnnnnnnnnnnnnnnnnnnnnnnnnnnnnnnnnnnnnnnnnnnnnnnnnnnnnnnnnnnnnnnnnnnnnnnnnnnnnnnnnnnnnnnnnnnnnnnnnnnnnnnnnnnnnnnnnnnnnnnnnnnnnnnnnnnnnnnnnnnnnnnnnnnnnnnnnnnnnnnnnnnnnnnnnnnnnnnnnnnnnnnnnnnnnnnnnnnnnnnnnnnnnnnnnnnnnnnnnnnnnnnnnnnnnnnnnnnnnnnnnnnnnnnnnnnnnnnnnnnnnnnnnnnnnnnnnnnnnnnnnnnnnnnnnnnnnnnnnnnnnnnnnnnnnnnnnnnnnnnnnnnnnnnnnnnnnnnnnnnnnnnnnnnnnnnnnnnnnnnnnnnnnnnnnnnnnnnnnnnnnnnnnnnnnnnnnnnnnnnnnnnnnnnnnnnnnnnnnnnnnnnnnnnnnnnnnnnnnnnnnnnnnnnnnnnnnnnnnnnnnnnnnnnnnnnnnnnnnnnnnnnnnnnnnnnnnnnnnnnnnnnnnnnnnnnnnnnnnnnnnnnnnnnnnnnnnnnnnnnnnnnnnnnnnnnnnnnnnnnnnnnnnnnnnnnnnnnnnnnnnnnnnnnnnnnnnnnnnnnnnnnnnnnnnnnnnnnnnnnnnnnnnnnnnnnnnnnnnnnnnnnnnnnnnnnnnnnnnnnnnnnnnnnnnnnnnnnnnnnnnnnnnnnnnnnnnnnnnnnnnnnnnnnnnnnnnnnnnnnnnnnnnnnnnnnnnnnnnnnnnnnnnnnnnnnnnnnnnnnnnnnnnnnnnnnnnnnnnnnnnnnnnnnnnnnnnnnnnnnnnnnnnnnnnnnnnnnnnnnnnnnnnnnnnnnnnnnnnnnnnnnnnnnnnnnnnnnnnnnnnnnnnnnnnnnnnnnnnnnnnnnnnnnnnnnnnnnnnnnnnnnnnnnnnnnnnnnnnnnnnnnnnnnnnnnnnnnnnnnnnnnnnnnnnnnnnnnnnnnnnnnnnnnnnnnnnnnnnnnnnnnnnnnnnnnnnnnnnnnnnnnnnnnnnnnnnnnnnnnnnnnnnnnnnnnnnnnnnnnnnnnnnnnnnnnnnnnnnnnnnnnnnnnnnnnnnnnnnnnnnnnnnnnnnnnnnnnnnnnnnnnnnnnnnnnnnnnnnnnnnnnnnnnnnnnnnnnnnnnnnnnnnnnnnnnnnnnnnnnnnnnnnnnnnnnnnnnnnnnnnnnnnnnnnnnnnnnnnnnnnnnnnnnnnnnnnnnnnnnnnnnnnnnnnnnnnnnnnnnnnnnnnnnnnnnnnnnnnnnnnnnnnnnnnnnnnnnnnnnnnnnnnnnnnnnnnnnnnnnnnnnnnnnnnnnnnnnnnnnnnnnnnnnnnnnnnnnnnnnnnnnnnnnnnnnnnnnnnnnnnnnnnnnnnnnnnnnnnnnnnnnnnnnnnnnnnnnnnnnnnnnnnnnnnnnnnnnnnnnnnnnnnnnnnnnnnnnnnnnnnnnnnnnnnnnnnnnnnnnnnnnnnnnnnnnnnnnnnnnnnnnnnnnnnnnnnnnnnnnnnnnnnnnnnnnnnnnnnnnnnnnnnnnnnnnnnnnnnnnnnnnnnnnnnnnnnnnnnnnnnnnnnnnnnnnnnnnnnnnnnnnnnnnnnnnnnnnnnnnnnnnnnnnnnnnnnnnnnnnnnnnnnnnnnnnnnnnnnnnnnnnnnnnnnnnnnnnnnnnnnnnnnnnnnnnnnnnnnnnnnnnnnnnnnnnnnnnnnnnnnnnnnnnnnnnnnnnnnnnnnnnnnnnnnnnnnnnnnnnnnnnnnnnnnnnnnnnnnnnnnnnnnnnnnnnnnnnnnnnnnnnnnnnnnnnnnnnnnnnnnnnnnnnnnnnnnnnnnnnnnnnnnnnnnnnnnnnnnnnnnnnnnnnnnnnnnnnnnnnnnnnnnnnnnnnnnnnnnnnnnnnnnnnnnnnnnnnnnnnnnnnnnnnnnnnnnnnnnnnnnnnnnnnnnnnnnnnnnnnnnnnnnnnnnnnnnnnnnnnnnnnnnnnnnnnnnnnnnnnnnnnnnnnnnnnnnnnnnnnnnnnnnnnnnnnnnnnnnnnnnnnnnnnnnnnnnnnnnnnnnnnnnnnnnnnnnnnnnnnnnnnnnnnnnnnnnnnnnnnnnnnnnnnnnnnnnnnnnnnnnnnnnnnnnnnnnnnnnnnnnnnnnnnnnnnnnnnnnnnnnnnnnnnnnnnnnnnnnnnnnnnnnnnnnnnnnnnnnnnnnnnnnnnnnnnnnnnnnnnnnnnnnnnnnnnnnnnnnnnnnnnnnnnnnnnnnnnnnnnnnnnnnnnnnnnnnnnnnnnnnnnnnnnnnnnnnnnnnnnnnnnnnnnnnnnnnnnnnnnnnnnnnnnnnnnnnnnnnnnnnnnnnnnnnnnnnnnnnnnnnnnnnnnnnnnnnnnnnnnnnnnnnnnnnnnnnnnnnnnnnnnnnnnnnnnnnnnnnnnnnnnnnnnnnnnnnnnnnnnnnnnnnnnnnnnnnnnnnnnnnnnnnnnnnnnnnnnnnnnnnnnnnnnnnnnnnnnnnnnnnnnnnnnnnnnnnnnnnnnnnnnnnnnnnnnnnnnnnnnnnnnnnnnnnnnnnnnnnnnnnnnnnnnnnnnnnnnnnnnnnnnnnnnnnnnnnnnnnnnnnnnnnnnnnnnnnnnnnnnnnnnnnnnnnnnnnnnnnnnnnnnnnnnnnnnnnnnnnnnnnnnnnnnnnnnnnnnnnnnnnnnnnnnnnnnnnnnnnnnnnnnnnnnnnnnnnnnnnnnnnnnnnnnnnnnnnnnnnnnnnnnnnnnnnnnnnnnnnnnnnnnnnnnnnnnnnnnnnnnnnnnnnnnnnnnnnnnnnnnnnnnnnnnnnnnnnnnnnnnnnnnnnnnnnnnnnnnnnnnnnnnnnnnnnnnnnnnnnnnnnnnnnnnnnnnnnnnnnnnnnnnnnnnnnnnnnnnnnnnnnnnnnnnnnnnnnnnnnnnnnnnnnnnnnnnnnnnnnnnnnnnnnnnnnnnnnnnnnnnnnnnnnnnnnnnnnnnnnnnnnnnnnnnnnnnnnnnnnnnnnnnnnnnnnnnnnnnnnnnnnnnnnnnnnnnnnnnnnnnnnnnnnnnnnnnnnnnnnnnnnnnnnnnnnnnnnnnnnnnnnnnnnnnnnnnnnnnnnnnnnnnnnnnnnnnnnnnnnnnnnnnnnnnnnnnnnnnnnnnnnnnnnnnnnnnnnnnnnnnnnnnnnnnnnnnnnnnnnnnnnnnnnnnnnnnnnnnnnnnnnnnnnnnnnnnnnnnnnnnnnnnnnnnnnnnnnnnnnnnnnnnnnnnnnnnnnnnnnnnnnnnnnnnnnnnnnnnnnnnnnnnnnnnnnnnnnnnnnnnnnnnnnnnnnnnnnnnnnnnnnnnnnnnnnnnnnnnnnnnnnnnnnnnnnnnnnnnnnnnnnnnnnnnnnnnnnnnnnnnnnnnnnnnnnnnnnnnnnnnnnnnnnnnnnnnnnnnnnnnnnnnnnnnnnnnnnnnnnnnnnnnnnnnnnnnnnnnnnnnnnnnnnnnnnnnnnnnnnnnnnnnnnnnnnnnnnnnnnnnnnnnnnnnnnnnnnnnnnnnnnnnnnnnnnnnnnnnnnnnnnnnnnnnnnnnnnnnnnnnnnnnnnnnnnnnnnnnnnnnnnnnnnnnnnnnnnnnnnnnnnnnnnnnnnnnnnnnnnnnnnnnnnnnnnnnnnnnnnnnnnnnnnnnnnnnnnnnnnnnnnnnnnnnnnnnnnnnnnnnnnnnnnnnnnnnnnnnnnnnnnnnnnnnnnnnnnnnnnnnnnnnnnnnnnnnnnnnnnnnnnnnnnnnnnnnnnnnnnnnnnnnnnnnnnnnnnnnnnnnnnnnnnnnnnnnnnnnnnnnnnnnnnnnnnnnnnnnnnnnnnnnnnnnnnnnnnnnnnnnnnnnnnnnnnnnnnnnnnnnnnnnnnnnnnnnnnnnnnnnnnnnnnnnnnnnnnnnnnnnnnnnnnnnnnnnnnnnnnnnnnnnnnnnnnnnnnnnnnnnnnnnnnnnnnnnnnnnnnnnnnnnnnnnnnnnnnnnnnnnnnnnnnnnnnnnnnnnnnnnnnnnnnnnnnnnnnnnnnnnnnnnnnnnnnnnnnnnnnnnnnnnnnnnnnnnnnnnnnnnnnnnnnnnnnnnnnnnnnnnnnnnnnnnnnnnnnnnnnnnnnnnnnnnnnnnnnnnnnnnnnnnnnnnnnnnnnnnnnnnnnnnnnnnnnnnnnnnnnnnnnnnnnnnnnnnnnnnnnnnnnnnnnnnnnnnnnnnnnnnnnnnnnnnnnnnnnnnnnnnnnnnnnnnnnnnnnnnnnnnnnnnnnnnnnnnnnnnnnnnnnnnnnnnnnnnnnnnnnnnnnnnnnnnnnnnnnnnnnnnnnnnnnnnnnnnnnnnnnnnnnnnnnnnnnnnnnnnnnnnnnnnnnnnnnnnnnnnnnnnnnnnnnnnnnnnnnnnnnnnnnnnnnnnnnnnnnnnnnnnnnnnnnnnnnnnnnnnnnnnnnnnnnnnnnnnnnnnnnnnnnnnnnnnnnnnnnnnnnnnnnnnnnnnnnnnnnnnnnnnnnnnnnnnnnnnnnnnnnnnnnnnnnnnnnnnnnnnnnnnnnnnnnnnnnnnnnnnnnnnnnnnnnnnnnnnnnnnnnnnnnnnnnnnnnnnnnnnnnnnnnnnnnnnnnnnnnnnnnnnnnnnnnnnnnnnnnnnnnnnnnnnnnnnnnnnnnnnnnnnnnnnnnnnnnnnnnnnnnnnnnnnnnnnnnnnnnnnnnnnnnnnnnnnnnnnnnnnnnnnnnnnnnnnnnnnnnnnnnnnnnnnnnnnnnnnnnnnnnnnnnnnnnnnnnnnnnnnnnnnnnnnnnnnnnnnnnnnnnnnnnnnnnnnnnnnnnnnnnnnnnnnnnnnnnnnnnnnnnnnnnnnnnnnnnnnnnnnnnnnnnnnnnnnnnnnnnnnnnnnnnnnnnnnnnnnnnnnnnnnnnnnnnnnnnnnnnnnnnnnnnnnnnnnnnnnnnnnnnnnnnnnnnnnnnnnnnnnnnnnnnnnnnnnnnnnnnnnnnnnnnnnnnnnnnnnnnnnnnnnnnnnnnnnnnnnnnnnnnnnnnnnnnnnnnnnnnnnnnnnnnnnnnnnnnnnnnnnnnnnnnnnnnnnnnnnnnnnnnnnnnnnnnnnnnnnnnnnnnnnnnnnnnnnnnnnnnnnnnnnnnnnnnnnnnnnnnnnnnnnnnnnnnnnnnnnnnnnnnnnnnnnnnnnnnnnnnnnnnnnnnnnnnnnnnnnnnnnnnnnnnnnnnnnnnnnnnnnnnnnnnnnnnnnnnnnnnnnnnnnnnnnnnnnnnnnnnnnnnnnnnnnnnnnnnnnnnnnnnnnnnnnnnnnnnnnnnnnnnnnnnnnnnnnnnnnnnnnnnnnnnnnnnnnnnnnnnnnnnnnnnnnnnnnnnnnnnnnnnnnnnnnnnnnnnnnnnnnnnnnnnnnnnnnnnnnnnnnnnnnnnnnnnnnnnnnnnnnnnnnnnnnnnnnnnnnnnnnnnnnnnnnnnnnnnnnnnnnnnnnnnnnnnnnnnnnnnnnnnnnnnnnnnnnnnnnnnnnnnnnnnnnnnnnnnnnnnnnnnnnnnnnnnnnnnnnnnnnnnnnnnnnnnnnnnnnnnnnnnnnnnnnnnnnnnnnnnnnnnnnnnnnnnnnnnnnnnnnnnnnnnnnnnnnnnnnnnnnnnnnnnnnnnnnnnnnnnnnnnnnnnnnnnnnnnnnnnnnnnnnnnnnnnnnnnnnnnnnnnnnnnnnnnnnnnnnnnnnnnnnnnnnnnnnnnnnnnnnnnnnnnnnnnnnnnnnnnnnnnnnnnnnnnnnnnnnnnnnnnnnnnnnnnnnnnnnnnnnnnnnnnnnnnnnnnnnnnnnnnnnnnnnnnnnnnnnnnnnnnnnnnnnnnnnnnnnnnnnnnnnnnnnnnnnnnnnnnnnnnnnnnnnnnnnnnnnnnnnnnnnnnnnnnnnnnnnnnnnnnnnnnnnnnnnnnnnnnnnnnnnnnnnnnnnnnnnnnnnnnnnnnnnnnnnnnnnnnnnnnnnnnnnnnnnnnnnnnnnnnnnnnnnnnnnnnnnnnnnnnnnnnnnnnnnnnnnnnnnnnnnnnnnnnnnnnnnnnnnnnnnnnnnnnnnnnnnnnnnnnnnnnnnnnnnnnnnnnnnnnnnnnnnnnnnnnnnnnnnnnnnnnnnnnnnnnnnnnnnnnnnnnnnnnnnnnnnnnnnnnnnnnnnnnnnnnnnnnnnnnnnnnnnnnnnnnnnnnnnnnnnnnnnnnnnnnnnnnnnnnnnnnnnnnnnnnnnnnnnnnnnnnnnnnnnnnnnnnnnnnnnnnnnnnnnnnnnnnnnnnnnnnnnnnnnnnnnnnnnnnnnnnnnnnnnnnnnnnnnnnnnnnnnnnnnnnnnnnnnnnnnnnnnnnnnnnnnnnnnnnnnnnnnnnnnnnnnnnnnnnnnnnnnnnnnnnnnnnnnnnnnnnnnnnnnnnnnnnnnnnnnnnnnnnnnnnnnnnnnnnnnnnnnnnnnnnnnnnnnnnnnnnnnnnnnnnnnnnnnnnnnnnnnnnnnnnnnnnnnnnnnnnnnnnnnnnnnnnnnnnnnnnnnnnnnnnnnnnnnnnnnnnnnnnnnnnnnnnnnnnnnnnnnnnnnnnnnnnnnnnnnnnnnnnnnnnnnnnnnnnnnnnnnnnnnnnnnnnnnnnnnnnnnnnnnnnnnnnnnnnnnnnnnnnnnnnnnnnnnnnnnnnnnnnnnnnnnnnnnnnnnnnnnnnnnnnnnnnnnnnnnnnnnnnnnnnnnnnnnnnnnnnnnnnnnnnnnnnnnnnnnnnnnnnnnnnnnnnnnnnnnnnnnnnnnnnnnnnnnnnnnnnnnnnnnnnnnnnnnnnnnnnnnnnnnnnnnnnnnnnnnnnnnnnnnnnnnnnnnnnnnnnnnnnnnnnnnnnnnnnnnnnnnnnnnnnnnnnnnnnnnnnnnnnnnnnnnnnnnnnnnnnnnnnnnnnnnnnnnnnnnnnnnnnnnnnnnnnnnnnnnnnnnnnnnnnnnnnnnnnnnnnnnnnnnnnnnnnnnnnnnnnnnnnnnnnnnnnnnnnnnnnnnnnnnnnnnnnnnnnnnnnnnnnnnnnnnnnnnnnnnnnnnnnnnnnnnnnnnnnnnnnnnnnnnnnnnnnnnnnnnnnnnnnnnnnnnnnnnnnnnnnnnnnnnnnnnnnnnnnnnnnnnnnnnnnnnnnnnnnnnnnnnnnnnnnnnnnnnnnnnnnnnnnnnnnnnnnnnnnnnnnnnnnnnnnnnnnnnnnnnnnnnnnnnnnnnnnnnnnnnnnnnnnnnnnnnnnnnnnnnnnnnnnnnnnnnnnnnnnnnnnnnnnnnnnnnnnnnnnnnnnnnnnnnnnnnnnnnnnnnnnnnnnnnnnnnnnnnnnnnnnnnnnnnnnnnnnnnnnnnnnnnnnnnnnnnnnnnnnnnnnnnnnnnnnnnnnnnnnnnnnnnnnnnnnnnnnnnnnnnnnnnnnnnnnnnnnnnnnnnnnnnnnnnnnnnnnnnnnnnnnnnnnnnnnnnnnnnnnnnnnnnnnnnnnnnnnnnnnnnnnnnnnnnnnnnnnnnnnnnnnnnnnnnnnnnnnnnnnnnnnnnnnnnnnnnnnnnnnnnnnnnnnnnnnnnnnnnnnnnnnnnnnnnnnnnnnnnnnnnnnnnnnnnnnnnnnnnnnnnnnnnnnnnnnnnnnnnnnnnnnnnnnnnnnnnnnnnnnnnnnnnnnnnnnnnnnnnnnnnnnnnnnnnnnnnnnnnnnnnnnnnnnnnnnnnnnnnnnnnnnnnnnnnnnnnnnnnnnnnnnnnnnnnnnnnnnnnnnnnnnnnnnnnnnnnnnnnnnnnnnnnnnnnnnnnnnnnnnnnnnnnnnnnnnnnnnnnnnnnnnnnnnnnnnnnnnnnnnnnnnnnnnnnnnnnnnnnnnnnnnnnnnnnnnnnnnnnnnnnnnnnnnnnnnnnnnnnnnnnnnnnnnnnnnnnnnnnnnnnnnnnnnnnnnnnnnnnnnnnnnnnnnnnnnnnnnnnnnnnnnnnnnnnnnnnnnnnnnnnnnnnnnnnnnnnnnnnnnnnnnnnnnnnnnnnnnnnnnnnnnnnnnnnnnnnnnnnnnnnnnnnnnnnnnnnnnnnnnnnnnnnnnnnnnnnnnnnnnnnnnnnnnnnnnnnnnnnnnnnnnnnnnnnnnnnnnnnnnnnnnnnnnnnnnnnnnnnnnnnnnnnnnnnnnnnnnnnnnnnnnnnnnnnnnnnnnnnnnnnnnnnnnnnnnnnnnnnnnnnnnnnnnnnnnnnnnnnnnnnnnnnnnnnnnnnnnnnnnnnnnnnnnnnnnnnnnnnnnnnnnnnnnnnnnnnnnnnnnnnnnnnnnnnnnnnnnnnnnnnnnnnnnnnnnnnnnnnnnnnnnnnnnnnnnnnnnnnnnnnnnnnnnnnnnnnnnnnnnnnnnnnnnnnnnnnnnnnnnnnnnnnnnnnnnnnnnnnnnnnnnnnnnnnnnnnnnnnnnnnnnnnnnnnnnnnnnnnnnnnnnnnnnnnnnnnnnnnnnnnnnnnnnnnnnnnnnnnnnnnnnnnnnnnnnnnnnnnnnnnnnnnnnnnnnnnnnnnnnnnnnnnnnnnnnnnnnnnnnnnnnnnnnnnnnnnnnnnnnnnnnnnnnnnnnnnnnnnnnnnnnnnnnnnnnnnnnnnnnnnnnnnnnnnnnnnnnnnnnnnnnnnnnnnnnnnnnnnnnnnnnnnnnnnnnnnnnnnnnnnnnnnnnnnnnnnnnnnnnnnnnnnnnnnnnnnnnnnnnnnnnnnnnnnnnnnnnnnnnnnnnnnnnnnnnnnnnnnnnnnnnnnnnnnnnnnnnnnnnnnnnnnnnnnnnnnnnnnnnnnnnnnnnnnnnnnnnnnnnnnnnnnnnnnnnnnnnnnnnnnnnnnnnnnnnnnnnnnnnnnnnnnnnnnnnnnnnnnnnnnnnnnnnnnnnnnnnnnnnnnnnnnnnnnnnnnnnnnnnnnnnnnnnnnnnnnnnnnnnnnnnnnnnnnnnnnnnnnnnnnnnnnnnnnnnnnnnnnnnnnnnnnnnnnnnnnnnnnnnnnnnnnnnnnnnnnnnnnnnnnnnnnnnnnnnnnnnnnnnnnnnnnnnnnnnnnnnnnnnnnnnnnnnnnnnnnnnnnnnnnnnnnnnnnnnnnnnnnnnnnnnnnnnnnnnnnnnnnnnnnnnnnnnnnnnnnnnnnnnnnnnnnnnnnnnnnnnnnnnnnnnnnnnnnnnnnnnnnnnnnnnnnnnnnnnnnnnnnnnnnnnnnnnnnnnnnnnnnnnnnnnnnnnnnnnnnnnnnnnnnnnnnnnnnnnnnnnnnnnnnnnnnnnnnnnnnnnnnnnnnnnnnnnnnnnnnnnnnnnnnnnnnnnnnnnnnnnnnnnnnnnnnnnnnnnnnnnnnnnnnnnnnnnnnnnnnnnnnnnnnnnnnnnnnnnnnnnnnnnnnnnnnnnnnnnnnnnnnnnnnnnnnnnnnnnnnnnnnnnnnnnnnnnnnnnnnnnnnnnnnnnnnnnnnnnnnnnnnnnnnnnnnnnnnnnnnnnnnnnnnnnnnnnnnnnnnnnnnnnnnnnnnnnnnnnnnnnnnnnnnnnnnnnnnnnnnnnnnnnnnnnnnnnnnnnnnnnnnnnnnnnnnnnnnnnnnnnnnnnnnnnnnnnnnnnnnnnnnnnnnnnnnnnnnnnnnnnnnnnnnnnnnnnnnnnnnnnnnnnnnnnnnnnnnnnnnnnnnnnnnnnnnnnnnnnnnnnnnnnnnnnnnnnnnnnnnnnnnnnnnnnnnnnnnnnnnnnnnnnnnnnnnnnnnnnnnnnnnnnnnnnnnnnnnnnnnnnnnnnnnnnnnnnnnnnnnnnnnnnnnnnnnnnnnnnnnnnnnnnnnnnnnnnnnnnnnnnnnnnnnnnnnnnnnnnnnnnnnnnnnnnnnnnnnnnnnnnnnnnnnnnnnnnnnnnnnnnnnnnnnnnnnnnnnnnnnnnnnnnnnnnnnnnnnnnnnnnnnnnnnnnnnnnnnnnnnnnnnnnnnnnnnnnnnnnnnnnnnnnnnnnnnnnnnnnnnnnnnnnnnnnnnnnnnnnnnnnnnnnnnnnnnnnnnnnnnnnnnnnnnnnnnnnnnnnnnnnnnnnnnnnnnnnnnnnnnnnnnnnnnnnnnnnnnnnnnnnnnnnnnnnnnnnnnnnnnnnnnnnnnnnnnnnnnnnnnnnnnnnnnnnnnnnnnnnnnnnnnnnnnnnnnnnnnnnnnnnnnnnnnnnnnnnnnnnnnnnnnnnnnnnnnnnnnnnnnnnnnnnnnnnnnnnnnnnnnnnnnnnnnnnnnnnnnnnnnnnnnnnnnnnnnnnnnnnnnnnnnnnnnnnnnnnnnnnnnnnnnnnnnnnnnnnnnnnnnnnnnnnnnnnnnnnnnnnnnnnnnnnnnnnnnnnnnnnnnnnnnnnnnnnnnnnnnnnnnnnnnnnnnnnnnnnnnnnnnnnnnnnnnnnnnnnnnnnnnnnnnnnnnnnnnnnnnnnnnnnnnnnnnnnnnnnnnnnnnnnnnnnnnnnnnnnnnnnnnnnnnnnnnnnnnnnnnnnnnnnnnnnnnnnnnnnnnnnnnnnnnnnnnnnnnnnnnnnnnnnnnnnnnnnnnnnnnnnnnnnnnnnnnnnnnnnnnnnnnnnnnnnnnnnnnnnnnnnnnnnnnnnnnnnnnnnnnnnnnnnnnnnnnnnnnnnnnnnnnnnnnnnnnnnnnnnnnnnnnnnnnnnnnnnnnnnnnnnnnnnnnnnnnnnnnnnnnnnnnnnnnnnnnnnnnnnnnnnnnnnnnnnnnnnnnnnnnnnnnnnnnnnnnnnnnnnnnnnnnnnnnnnnnnnnnnnnnnnnnnnnnnnnnnnnnnnnnnnnnnnnnnnnnnnnnnnnnnnnnnnnnnnnnnnnnnnnnnnnnnnnnnnnnnnnnnnnnnnnnnnnnnnnnnnnnnnnnnnnnnnnnnnnnnnnnnnnnnnnnnnnnnnnnnnnnnnnnnnnnnnnnnnnnnnnnnnnnnnnnnnnnnnnnnnnnnnnnnnnnnnnnnnnnnnnnnnnnnnnnnnnnnnnnnnnnnnnnnnnnnnnnnnnnnnnnnnnnnnnnnnnnnnnnnnnnnnnnnnnnnnnnnnnnnnnnnnnnnnnnnnnnnnnnnnnnnnnnnnnnnnnnnnnnnnnnnnnnnnnnnnnnnnnnnnnnnnnnnnnnnnnnnnnnnnnnnnnnnnnnnnnnnnnnnnnnnnnnnnnnnnnnnnnnnnnnnnnnnnnnnnnnnnnnnnnnnnnnnnnnnnnnnnnnnnnnnnnnnnnnnnnnnnnnnnnnnnnnnnnnnnnnnnnnnnnnnnnnnnnnnnnnnnnnnnnnnnnnnnnnnnnnnnnnnnnnnnnnnnnnnnnnnnnnnnnnnnnnnnnnnnnnnnnnnnnnnnnnnnnnnnnnnnnnnnnnnnnnnnnnnnnnnnnnnnnnnnnnnnnnnnnnnnnnnnnnnnnnnnnnnnnnnnnnnnnnnnnnnnnnnnnnnnnnnnnnnnnnnnnnnnnnnnnnnnnnnnnnnnnnnnnnnnnnnnnnnnnnnnnnnnnnnnnnnnnnnnnnnnnnnnnnnnnnnnnnnnnnnnnnnnnnnnnnnnnnnnnnnnnnnnnnnnnnnnnnnnnnnnnnnnnnnnnnnnnnnnnnnnnnnnnnnnnnnnnnnnnnnnnnnnnnnnnnnnnnnnnnnnnnnnnnnnnnnnnnnnnnnnnnnnnnnnnnnnnnnnnnnnnnnnnnnnnnnnnnnnnnnnnnnnnnnnnnnnnnnnnnnnnnnnnnnnnnnnnnnnnnnnnnnnnnnnnnnnnnnnnnnnnnnnnnnnnnnnnnnnnnnnnnnnnnnnnnnnnnnnnnnnnnnnnnnnnnnnnnnnnnnnnnnnnnnnnnnnnnnnnnnnnnnnnnnnnnnnnnnnnnnnnnnnnnnnnnnnnnnnnnnnnnnnnnnnnnnnnnnnnnnnnnnnnnnnnnnnnnnnnnnnnnnnnnnnnnnnnnnnnnnnnnnnnnnnnnnnnnnnnnnnnnnnnnnnnnnnnnnnnnnnnnnnnnnnnnnnnnnnnnnnnnnnnnnnnnnnnnnnnnnnnnnnnnnnnnnnnnnnnnnnnnnnnnnnnnnnnnnnnnnnnnnnnnnnnnnnnnnnnnnnnnnnnnnnnnnnnnnnnnnnnnnnnnnnnnnnnnnnnnnnnnnnnnnnnnnnnnnnnnnnnnnnnnnnnnnnnnnnnnnnnnnnnnnnnnnnnnnnnnnnnnnnnnnnnnnnnnnnnnnnnnnnnnnnnnnnnnnnnnnnnnnnnnnnnnnnnnnnnnnnnnnnnnnnnnnnnnnnnnnnnnnnnnnnnnnnnnnnnnnnnnnnnnnnnnnnnnnnnnnnnnnnnnnnnnnnnnnnnnnnnnnnnnnnnnnnnnnnnnnnnnnnnnnnnnnnnnnnnnnnnnnnnnnnnnnnnnnnnnnnnnnnnnnnnnnnnnnnnnnnnnnnnnnnnnnnnnnnnnnnnnnnnnnnnnnnnnnnnnnnnnnnnnnnnnnnnnnnnnnnnnnnnnnnnnnnnnnnnnnnnnnnnnnnnnnnnnnnnnnnnnnnnnnnnnnnnnnnnnnnnnnnnnnnnnnnnnnnnnnnnnnnnnnnnnnnnnnnnnnnnnnnnnnnnnnnnnnnnnnnnnnnnnnnnnnnnnnnnnnnnnnnnnnnnnnnnnnnnnnnnnnnnnnnnnnnnnnnnnnnnnnnnnnnnnnnnnnnnnnnnnnnnnnnnnnnnnnnnnnnnnnnnnnnnnnnnnnnnnnnnnnnnnnnnnnnnnnnnnnnnnnnnnnnnnnnnnnnnnnnnnnnnnnnnnnnnnnnnnnnnnnnnnnnnnnnnnnnnnnnnnnnnnnnnnnnnnnnnnnnnnnnnnnnnnnnnnnnnnnnnnnnnnnnnnnnnnnnnnnnnnnnnnnnnnnnnnnnnnnnnnnnnnnnnnnnnnnnnnnnnnnnnnnnnnnnnnnnnnnnnnnnnnnnnnnnnnnnnnnnnnnnnnnnnnnnnnnnnnnnnnnnnnnnnnnnnnnnnnnnnnnnnnnnnnnnnnnnnnnnnnnnnnnnnnnnnnnnnnnnnnnnnnnnnnnnnnnnnnnnnnnnnnnnnnnnnnnnnnnnnnnnnnnnnnnnnnnnnnnnnnnnnnnnnnnnnnnnnnnnnnnnnnnnnnnnnnnnnnnnnnnnnnnnnnnnnnnnnnnnnnnnnnnnnnnnnnnnnnnnnnnnnnnnnnnnnnnnnnnnnnnnnnnnnnnnnnnnnnnnnnnnnnnnnnnnnnnnnnnnnnnnnnnnnnnnnnnnnnnnnnnnnnnnnnnnnnnnnnnnnnnnnnnnnnnnnnnnnnnnnnnnnnnnnnnnnnnnnnnnnnnnnnnnnnnnnnnnnnnnnnnnnnnnnnnnnnnnnnnnnnnnnnnnnnnnnnnnnnnnnnnnnnnnnnnnnnnnnnnnnnnnnnnnnnnnnnnnnnnnnnnnnnnnnnnnnnnnnnnnnnnnnnnnnnnnnnnnnnnnnnnnnnnnnnnnnnnnnnnnnnnnnnnnnnnnnnnnnnnnnnnnnnnnnnnnnnnnnnnnnnnnnnnnnnnnnnnnnnnnnnnnnnnnnnnnnnnnnnnnnnnnnnnnnnnnnnnnnnnnnnnnnnnnnnnnnnnnnnnnnnnnnnnnnnnnnnnnnnnnnnnnnnnnnnnnnnnnnnnnnnnnnnnnnnnnnnnnnnnnnnnnnnnnnnnnnnnnnnnnnnnnnnnnnnnnnnnnnnnnnnnnnnnnnnnnnnnnnnnnnnnnnnnnnnnnnnnnnnnnnnnnnnnnnnnnnnnnnnnnnnnnnnnnnnnnnnnnnnnnnnnnnnnnnnnnnnnnnnnnnnnnnnnnnnnnnnnnnnnnnnnnnnnnnnnnnnnnnnnnnnnnnnnnnnnnnnnnnnnnnnnnnnnnnnnnnnnnnnnnnnnnnnnnnnnnnnnnnnnnnnnnnnnnnnnnnnnnnnnnnnnnnnnnnnnnnnnnnnnnnnnnnnnnnnnnnnnnnnnnnnnnnnnnnnnnnnnnnnnnnnnnnnnnnnnnnnnnnnnnnnnnnnnnnnnnnnnnnnnnnnnnnnnnnnnnnnnnnnnnnnnnnnnnnnnnnnnnnnnnnnnnnnnnnnnnnnnnnnnnnnnnnnnnnnnnnnnnnnnnnnnnnnnnnnnnnnnnnnnnnnnnnnnnnnnnnnnnnnnnnnnnnnnnnnnnnnnnnnnnnnnnnnnnnnnnnnnnnnnnnnnnnnnnnnnnnnnnnnnnnnnnnnnnnnnnnnnnnnnnnnnnnnnnnnnnnnnnnnnnnnnnnnnnnnnnnnnnnnnnnnnnnnnnnnnnnnnnnnnnnnnnnnnnnnnnnnnnnnnnnnnnnnnnnnnnnnnnnnnnnnnnnnnnnnnnnnnnnnnnnnnnnnnnnnnnnnnnnnnnnnnnnnnnnnnnnnnnnnnnnnnnnnnnnnnnnnnnnnnnnnnnnnnnnnnnnnnnnnnnnnnnnnnnnnnnnnnnnnnnnnnnnnnnnnnnnnnnnnnnnnnnnnnnnnnnnnnnnnnnnnnnnnnnnnnnnnnnnnnnnnnnnnnnnnnnnnnnnnnnnnnnnnnnnnnnnnnnnnnnnnnnnnnnnnnnnnnnnnnnnnnnnnnnnnnnnnnnnnnnnnnnnnnnnnnnnnnnnnnnnnnnnnnnnnnnnnnnnnnnnnnnnnnnnnnnnnnnnnnnnnnnnnnnnnnnnnnnnnnnnnnnnnnnnnnnnnnnnnnnnnnnnnnnnnnnnnnnnnnnnnnnnnnnnnnnnnnnnnnnnnnnnnnnnnnnnnnnnnnnnnnnnnnnnnnnnnnnnnnnnnnnnnnnnnnnnnnnnnnnnnnnnnnnnnnnnnnnnnnnnnnnnnnnnnnnnnnnnnnnnnnnnnnnnnnnnnnnnnnnnnnnnnnnnnnnnnnnnnnnnnnnnnnnnnnnnnnnnnnnnnnnnnnnnnnnnnnnnnnnnnnnnnnnnnnnnnnnnnnnnnnnnnnnnnnnnnnnnnnnnnnnnnnnnnnnnnnnnnnnnnnnnnnnnnnnnnnnnnnnnnnnnnnnnnnnnnnnnnnnnnnnnnnnnnnnnnnnnnnnnnnnnnnnnnnnnnnnnnnnnnnnnnnnnnnnnnnnnnnnnnnnnnnnnnnnnnnnnnnnnnnnnnnnnnnnnnnnnnnnnnnnnnnnnnnnnnnnnnnnnnnnnnnnnnnnnnnnnnnnnnnnnnnnnnnnnnnnnnnnnnnnnnnnnnnnnnnnnnnnnnnnnnnnnnnnnnnnnnnnnnnnnnnnnnnnnnnnnnnnnnnnnnnnnnnnnnnnnnnnnnnnnnnnnnnnnnnnnnnnnnnnnnnnnnnnnnnnnnnnnnnnnnnnnnnnnnnnnnnnnnnnnnnnnnnnnnnnnnnnnnnnnnnnnnnnnnnnnnnnnnnnnnnnnnnnnnnnnnnnnnnnnnnnnnnnnnnnnnnnnnnnnnnnnnnnnnnnnnnnnnnnnnnnnnnnnnnnnnnnnnnnnnnnnnnnnnnnnnnnnnnnnnnnnnnnnnnnnnnnnnnnnnnnnnnnnnnnnnnnnnnnnnnnnnnnnnnnnnnnnnnnnnnnnnnnnnnnnnnnnnnnnnnnnnnnnnnnnnnnnnnnnnnnnnnnnnnnnnnnnnnnnnnnnnnnnnnnnnnnnnnnnnnnnnnnnnnnnnnnnnnnnnnnnnnnnnnnnnnnnnnnnnnnnnnnnnnnnnnnnnnnnnnnnnnnnnnnnnnnnnnnnnnnnnnnnnnnnnnnnnnnnnnnnnnnnnnnnnnnnnnnnnnnnnnnnnnnnnnnnnnnnnnnnnnnnnnnnnnnnnnnnnnnnnnnnnnnnnnnnnnnnnnnnnnnnnnnnnnnnnnnnnnnnnnnnnnnnnnnnnnnnnnnnnnnnnnnnnnnnnnnnnnnnnnnnnnnnnnnnnnnnnnnnnnnnnnnnnnnnnnnnnnnnnnnnnnnnnnnnnnnnnnnnnnnnnnnnnnnnnnnnnnnnnnnnnnnnnnnnnnnnnnnnnnnnnnnnnnnnnnnnnnnnnnnnnnnnnnnnnnnnnnnnnnnnnnnnnnnnnnnnnnnnnnnnnnnnnnnnnnnnnnnnnnnnnnnnnnnnnnnnnnnnnnnnnnnnnnnnnnnnnnnnnnnnnnnnnnnnnnnnnnnnnnnnnnnnnnnnnnnnnnnnnnnnnnnnnnnnnnnnnnnnnnnnnnnnnnnnnnnnnnnnnnnnnnnnnnnnnnnnnnnnnnnnnnnnnnnnnnnnnnnnnnnnnnnnnnnnnnnnnnnnnnnnnnnnnnnnnnnnnnnnnnnnnnnnnnnnnnnnnnnnnnnnnnnnnnnnnnnnnnnnnnnnnnnnnnnnnnnnnnnnnnnnnnnnnnnnnnnnnnnnnnnnnnnnnnnnnnnnnnnnnnnnnnnnnnnnnnnnnnnnnnnnnnnnnnnnnnnnnnnnnnnnnnnnnnnnnnnnnnnnnnnnnnnnnnnnnnnnnnnnnnnnnnnnnnnnnnnnnnnnnnnnnnnnnnnnnnnnnnnnnnnnnnnnnnnnnnnnnnnnnnnnnnnnnnnnnnnnnnnnnnnnnnnnnnnnnnnnnnnnnnnnnnnnnnnnnnnnnnnnnnnnnnnnnnnnnnnnnnnnnnnnnnnnnnnnnnnnnnnnnnnnnnnnnnnnnnnnnnnnnnnnnnnnnnnnnnnnnnnnnnnnnnnnnnnnnnnnnnnnnnnnnnnnnnnnnnnnnnnnnnnnnnnnnnnnnnnnnnnnnnnnnnnnnnnnnnnnnnnnnnnnnnnnnnnnnnnnnnnnnnnnnnnnnnnnnnnnnnnnnnnnnnnnnnnnnnnnnnnnnnnnnnnnnnnnnnnnnnnnnnnnnnnnnnnnnnnnnnnnnnnnnnnnnnnnnnnnnnnnnnnnnnnnnnnnnnnnnnnnnnnnnnnnnnnnnnnnnnnnnnnnnnnnnnnnnnnnnnnnnnnnnnnnnnnnnnnnnnnnnnnnnnnnnnnnnnnnnnnnnnnnnnnnnnnnnnnnnnnnnnnnnnnnnnnnnnnnnnnnnnnnnnnnnnnnnnnnnnnnnnnnnnnnnnnnnnnnnnnnnnnnnnnnnnnnnnnnnnnnnnnnnnnnnnnnnnnnnnnnnnnnnnnnnnnnnnnnnnnnnnnnnnnnnnnnnnnnnnnnnnnnnnnnnnnnnnnnnnnnnnnnnnnnnnnnnnnnnnnnnnnnnnnnnnnnnnnnnnnnnnnnnnnnnnnnnnnnnnnnnnnnnnnnnnnnnnnnnnnnnnnnnnnnnnnnnnnnnnnnnnnnnnnnnnnnnnnnnnnnnnnnnnnnnnnnnnnnnnnnnnnnnnnnnnnnnnnnnnnnnnnnnnnnnnnnnnnnnnnnnnnnnnnnnnnnnnnnnnnnnnnnnnnnnnnnnnnnnnnnnnnnnnnnnnnnnnnnnnnnnnnnnnnnnnnnnnnnnnnnnnnnnnnnnnnnnnnnnnnnnnnnnnnnnnnnnnnnnnnnnnnnnnnnnnnnnnnnnnnnnnnnnnnnnnnnnnnnnnnnnnnnnnnnnnnnnnnnnnnnnnnnnnnnnnnnnnnnnnnnnnnnnnnnnnnnnnnnnnnnnnnnnnnnnnnnnnnnnnnnnnnnnnnnnnnnnnnnnnnnnnnnnnnnnnnnnnnnnnnnnnnnnnnnnnnnnnnnnnnnnnnnnnnnnnnnnnnnnnnnnnnnnnnnnnnnnnnnnnnnnnnnnnnnnnnnnnnnnnnnnnnnnnnnnnnnnnnnnnnnnnnnnnnnnnnnnnnnnnnnnnnnnnnnnnnnnnnnnnnnnnnnnnnnnnnnnnnnnnnnnnnnnnnnnnnnnnnnnnnnnnnnnnnnnnnnnnnnnnnnnnnnnnnnnnnnnnnnnnnnnnnnnnnnnnnnnnnnnnnnnnnnnnnnnnnnnnnnnnnnnnnnnnnnnnnnnnnnnnnnnnnnnnnnnnnnnnnnnnnnnnnnnnnnnnnnnnnnnnnnnnnnnnnnnnnnnnnnnnnnnnnnnnnnnnnnnnnnnnnnnnnnnnnnnnnnnnnnnnnnnnnnnnnnnnnnnnnnnnnnnnnnnnnnnnnnnnnnnnnnnnnnnnnnnnnnnnnnnnnnnnnnnnnnnnnnnnnnnnnnnnnnnnnnnnnnnnnnnnnnnnnnnnnnnnnnnnnnnnnnnnnnnnnnnnnnnnnnnnnnnnnnnnnnnnnnnnnnnnnnnnnnnnnnnnnnnnnnnnnnnnnnnnnnnnnnnnnnnnnnnnnnnnnnnnnnnnnnnnnnnnnnnnnnnnnnnnnnnnnnnnnnnnnnnnnnnnnnnnnnnnnnnnnnnnnnnnnnnnnnnnnnnnnnnnnnnnnnnnnnnnnnnnnnnnnnnnnnnnnnnnnnnnnnnnnnnnnnnnnnnnnnnnnnnnnnnnnnnnnnnnnnnnnnnnnnnnnnnnnnnnnnnnnnnnnnnnnnnnnnnnnnnnnnnnnnnnnnnnnnnnnnnnnnnnnnnnnnnnnnnnnnnnnnnnnnnnnnnnnnnnnnnnnnnnnnnnnnnnnnnnnnnnnnnnnnnnnnnnnnnnnnnnnnnnnnnnnnnnnnnnnnnnnnnnnnnnnnnnnnnnnnnnnnnnnnnnnnnnnnnnnnnnnnnnnnnnnnnnnnnnnnnnnnnnnnnnnnnnnnnnnnnnnnnnnnnnnnnnnnnnnnnnnnnnnnnnnnnnnnnnnnnnnnnnnnnnnnnnnnnnnnnnnnnnnnnnnnnnnnnnnnnnnnnnnnnnnnnnnnnnnnnnnnnnnnnnnnnnnnnnnnnnnnnnnnnnnnnnnnnnnnnnnnnnnnnnnnnnnnnnnnnnnnnnnnnnnnnnnnnnnnnnnnnnnnnnnnnnnnnnnnnnnnnnnnnnnnnnnnnnnnnnnnnnnnnnnnnnnnnnnnnnnnnnnnnnnnnnnnnnnnnnnnnnnnnnnnnnnnnnnnnnnnnnnnnnnnnnnnnnnnnnnnnnnnnnnnnnnnnnnnnnnnnnnnnnnnnnnnnnnnnnnnnnnnnnnnnnnnnnnnnnnnnnnnnnnnnnnnnnnnnnnnnnnnnnnnnnnnnnnnnnnnnnnnnnnnnnnnnnnnnnnnnnnnnnnnnnnnnnnnnnnnnnnnnnnnnnnnnnnnnnnnnnnnnnnnnnnnnnnnnnnnnnnnnnnnnnnnnnnnnnnnnnnnnnnnnnnnnnnnnnnnnnnnnnnnnnnnnnnnnnnnnnnnnnnnnnnnnnnnnnnnnnnnnnnnnnnnnnnnnnnnnnnnnnnnnnnnnnnnnnnnnnnnnnnnnnnnnnnnnnnnnnnnnnnnnnnnnnnnnnnnnnnnnnnnnnnnnnnnnnnnnnnnnnnnnnnnnnnnnnnnnnnnnnnnnnnnnnnnnnnnnnnnnnnnnnnnnnnnnnnnnnnnnnnnnnnnnnnnnnnnnnnnnnnnnnnnnnnnnnnnnnnnnnnnnnnnnnnnnnnnnnnnnnnnnnnnnnnnnnnnnnnnnnnnnnnnnnnnnnnnnnnnnnnnnnnnnnnnnnnnnnnnnnnnnnnnnnnnnnnnnnnnnnnnnnnnnnnnnnnnnnnnnnnnnnnnnnnnnnnnnnnnnnnnnnnnnnnnnnnnnnnnnnnnnnnnnnnnnnnnnnnnnnnnnnnnnnnnnnnnnnnnnnnnnnnnnnnnnnnnnnnnnnnnnnnnnnnnnnnnnnnnnnnnnnnnnnnnnnnnnnnnnnnnnnnnnnnnnnnnnnnnnnnnnnnnnnnnnnnnnnnnnnnnnnnnnnnnnnnnnnnnnnnnnnnnnnnnnnnnnnnnnnnnnnnnnnnnnnnnnnnnnnnnnnnnnnnnnnnnnnnnnnnnnnnnnnnnnnnnnnnnnnnnnnnnnnnnnnnnnnnnnnnnnnnnnnnnnnnnnnnnnnnnnnnnnnnnnnnnnnnnnnnnnnnnnnnnnnnnnnnnnnnnnnnnnnnnnnnnnnnnnnnnnnnnnnnnnnnnnnnnnnnnnnnnnnnnnnnnnnnnnnnnnnnnnnnnnnnnnnnnnnnnnnnnnnnnnnnnnnnnnnnnnnnnnnnnnnnnnnnnnnnnnnnnnnnnnnnnnnnnnnnnnnnnnnnnnnnnnnnnnnnnnnnnnnnnnnnnnnnnnnnnnnnnnnnnnnnnnnnnnnnnnnnnnnnnnnnnnnnnnnnnnnnnnnnnnnnnnnnnnnnnnnnnnnnnnnnnnnnnnnnnnnnnnnnnnnnnnnnnnnnnnnnnnnnnnnnnnnnnnnnnnnnnnnnnnnnnnnnnnnnnnnnnnnnnnnnnnnnnnnnnnnnnnnnnnnnnnnnnnnnnnnnnnnnnnnnnnnnnnnnnnnnnnnnnnnnnnnnnnnnnnnnnnnnnnnnnnnnnnnnnnnnnnnnnnnnnnnnnnnnnnnnnnnnnnnnnnnnnnnnnnnnnnnnnnnnnnnnnnnnnnnnnnnnnnnnnnnnnnnnnnnnnnnnnnnnnnnnnnnnnnnnnnnnnnnnnnnnnnnnnnnnnnnnnnnnnnnnnnnnnnnnnnnnnnnnnnnnnnnnnnnnnnnnnnnnnnnnnnnnnnnnnnnnnnnnnnnnnnnnnnnnnnnnnnnnnnnnnnnnnnnnnnnnnnnnnnnnnnnnnnnnnnnnnnnnnnnnnnnnnnnnnnnnnnnnnnnnnnnnnnnnnnnnnnnnnnnnnnnnnnnnnnnnnnnnnnnnnnnnnnnnnnnnnnnnnnnnnnnnnnnnnnnnnnnnnnnnnnnnnnnnnnnnnnnnnnnnnnnnnnnnnnnnnnnnnnnnnnnnnnnnnnnnnnnnnnnnnnnnnnnnnnnnnnnnnnnnnnnnnnnnnnnnnnnnnnnnnnnnnnnnnnnnnnnnnnnnnnnnnnnnnnnnnnnnnnnnnnnnnnnnnnnnnnnnnnnnnnnnnnnnnnnnnnnnnnnnnnnnnnnnnnnnnnnnnnnnnnnnnnnnnnnnnnnnnnnnnnnnnnnnnnnnnnnnnnnnnnnnnnnnnnnnnnnnnnnnnnnnnnnnnnnnnnnnnnnnnnnnnnnnnnnnnnnnnnnnnnnnnnnnnnnnnnnnnnnnnnnnnnnnnnnnnnnnnnnnnnnnnnnnnnnnnnnnnnnnnnnnnnnnnnnnnnnnnnnnnnnnnnnnnnnnnnnnnnnnnnnnnnnnnnnnnnnnnnnnnnnnnnnnnnnnnnnnnnnnnnnnnnnnnnnnnnnnnnnnnnnnnnnnnnnnnnnnnnnnnnnnnnnnnnnnnnnnnnnnnnnnnnnnnnnnnnnnnnnnnnnnnnnnnnnnnnnnnnnnnnnnnnnnnnnnnnnnnnnnnnnnnnnnnnnnnnnnnnnnnnnnnnnnnnnnnnnnnnnnnnnnnnnnnnnnnnnnnnnnnnnnnnnnnnnnnnnnnnnnnnnnnnnnnnnnnnnnnnnnnnnnnnnnnnnnnnnnnnnnnnnnnnnnnnnnnnnnnnnnnnnnnnnnnnnnnnnnnnnnnnnnnnnnnnnnnnnnnnnnnnnnnnnnnnnnnnnnnnnnnnnnnnnnnnnnnnnnnnnnnnnnnnnnnnnnnnnnnnnnnnnnnnnnnnnnnnnnnnnnnnnnnnnnnnnnnnnnnnnnnnnnnnnnnnnnnnnnnnnnnnnnnnnnnnnnnnnnnnnnnnnnnnnnnnnnnnnnnnnnnnnnnnnnnnnnnnnnnnnnnnnnnnnnnnnnnnnnnnnnnnnnnnnnnnnnnnnnnnnnnnnnnnnnnnnnnnnnnnnnnnnnnnnnnnnnnnnnnnnnnnnnnnnnnnnnnnnnnnnnnnnnnnnnnnnnnnnnnnnnnnnnnnnnnnnnnnnnnnnnnnnnnnnnnnnnnnnnnnnnnnnnnnnnnnnnnnnnnnnnnnnnnnnnnnnnnnnnnnnnnnnnnnnnnnnnnnnnnnnnnnnnnnnnnnnnnnnnnnnnnnnnnnnnnnnnnnnnnnnnnnnnnnnnnnnnnnnnnnnnnnnnnnnnnnnnnnnnnnnnnnnnnnnnnnnnnnnnnnnnnnnnnnnnnnnnnnnnnnnnnnnnnnnnnnnnnnnnnnnnnnnnnnnnnnnnnnnnnnnnnnnnnnnnnnnnnnnnnnnnnnnnnnnnnnnnnnnnnnnnnnnnnnnnnnnnnnnnnnnnnnnnnnnnnnnnnnnnnnnnnnnnnnnnnnnnnnnnnnnnnnnnnnnnnnnnnnnnnnnnnnnnnnnnnnnnnnnnnnnnnnnnnnnnnnnnnnnnnnnnnnnnnnnnnnnnnnnnnnnnnnnnnnnnnnnnnnnnnnnnnnnnnnnnnnnnnnnnnnnnnnnnnnnnnnnnnnnnnnnnnnnnnnnnnnnnnnnnnnnnnnnnnnnnnnnnnnnnnnnnnnnnnnnnnnnnnnnnnnnnnnnnnnnnnnnnnnnnnnnnnnnnnnnnnnnnnnnnnnnnnnnnnnnnnnnnnnnnnnnnnnnnnnnnnnnnnnnnnnnnnnnnnnnnnnnnnnnnnnnnnnnnnnnnnnnnnnnnnnnnnnnnnnnnnnnnnnnnnnnnnnnnnnnnnnnnnnnnnnnnnnnnnnnnnnnnnnnnnnnnnnnnnnnnnnnnnnnnnnnnnnnnnnnnnnnnnnnnnnnnnnnnnnnnnnnnnnnnnnnnnnnnnnnnnnnnnnnnnnnnnnnnnnnnnnnnnnnnnnnnnnnnnnnnnnnnnnnnnnnnnnnnnnnnnnnnnnnnnnnnnnnnnnnnnnnnnnnnnnnnnnnnnnnnnnnnnnnnnnnnnnnnnnnnnnnnnnnnnnnnnnnnnnnnnnnnnnnnnnnnnnnnnnnnnnnnnnnnnnnnnnnnnnnnnnnnnnnnnnnnnnnnnnnnnnnnnnnnnnnnnnnnnnnnnnnnnnnnnnnnnnnnnnnnnnnnnnnnnnnnnnnnnnnnnnnnnnnnnnnnnnnnnnnnnnnnnnnnnnnnnnnnnnnnnnnnnnnnnnnnnnnnnnnnnnnnnnnnnnnnnnnnnnnnnnnnnnnnnnnnnnnnnnnnnnnnnnnnnnnnnnnnnnnnnnnnnnnnnnnnnnnnnnnnnnnnnnnnnnnnnnnnnnnnnnnnnnnnnnnnnnnnnnnnnnnnnnnnnnnnnnnnnnnnnnnnnnnnnnnnnnnnnnnnnnnnnnnnnnnnnnnnnnnnnnnnnnnnnnnnnnnnnnnnnnnnnnnnnnnnnnnnnnnnnnnnnnnnnnnnnnnnnnnnnnnnnnnnnnnnnnnnnnnnnnnnnnnnnnnnnnnnnnnnnnnnnnnnnnnnnnnnnnnnnnnnnnnnnnnnnnnnnnnnnnnnnnnnnnnnnnnnnnnnnnnnnnnnnnnnnnnnnnnnnnnnnnnnnnnnnnnnnnnnnnnnnnnnnnnnnnnnnnnnnnnnnnnnnnnnnnnnnnnnnnnnnnnnnnnnnnnnnnnnnnnnnnnnnnnnnnnnnnnnnnnnnnnnnnnnnnnnnnnnnnnnnnnnnnnnnnnnnnnnnnnnnnnnnnnnnnnnnnnnnnnnnnnnnnnnnnnnnnnnnnnnnnnnnnnnnnnnnnnnnnnnnnnnnnnnnnnnnnnnnnnnnnnnnnnnnnnnnnnnnnnnnnnnnnnnnnnnnnnnnnnnnnnnnnnnnnnnnnnnnnnnnnnnnnnnnnnnnnnnnnnnnnnnnnnnnnnnnnnnnnnnnnnnnnnnnnnnnnnnnnnnnnnnnnnnnnnnnnnnnnnnnnnnnnnnnnnnnnnnnnnnnnnnnnnnnnnnnnnnnnnnnnnnnnnnnnnnnnnnnnnnnnnnnnnnnnnnnnnnnnnnnnnnnnnnnnnnnnnnnnnnnnnnnnnnnnnnnnnnnnnnnnnnnnnnnnnnnnnnnnnnnnnnnnnnnnnnnnnnnnnnnnnnnnnnnnnnnnnnnnnnnnnnnnnnnnnnnnnnnnnnnnnnnnnnnnnnnnnnnnnnnnnnnnnnnnnnnnnnnnnnnnnnnnnnnnnnnnnnnnnnnnnnnnnnnnnnnnnnnnnnnnnnnnnnnnnnnnnnnnnnnnnnnnnnnnnnnnnnnnnnnnnnnnnnnnnnnnnnnnnnnnnnnnnnnnnnnnnnnnnnnnnnnnnnnnnnnnnnnnnnnnnnnnnnnnnnnnnnnnnnnnnnnnnnnnnnnnnnnnnnnnnnnnnnnnnnnnnnnnnnnnnnnnnnnnnnnnnnnnnnnnnnnnnnnnnnnnnnnnnnnnnnnnnnnnnnnnnnnnnnnnnnnnnnnnnnnnnnnnnnnnnnnnnnnnnnnnnnnnnnnnnnnnnnnnnnnnnnnnnnnnnnnnnnnnnnnnnnnnnnnnnnnnnnnnnnnnnnnnnnnnnnnnnnnnnnnnnnnnnnnnnnnnnnnnnnnnnnnnnnnnnnnnnnnnnnnnnnnnnnnnnnnnnnnnnnnnnnnnnnnnnnnnnnnnnnnnnnnnnnnnnnnnnnnnnnnnnnnnnnnnnnnnnnnnnnnnnnnnnnnnnnnnnnnnnnnnnnnnnnnnnnnnnnnnnnnnnnnnnnnnnnnnnnnnnnnnnnnnnnnnnnnnnnnnnnnnnnnnnnnnnnnnnnnnnnnnnnnnnnnnnnnnnnnnnnnnnnnnnnnnnnnnnnnnnnnnnnnnnnnnnnnnnnnnnnnnnnnnnnnnnnnnnnnnnnnnnnnnnnnnnnnnnnnnnnnnnnnnnnnnnnnnnnnnnnnnnnnnnnnnnnnnnnnnnnnnnnnnnnnnnnnnnnnnnnnnnnnnnnnnnnnnnnnnnnnnnnnnnnnnnnnnnnnnnnnnnnnnnnnnnnnnnnnnnnnnnnnnnnnnnnnnnnnnnnnnnnnnnnnnnnnnnnnnnnnnnnnnnnnnnnnnnnnnnnnnnnnnnnnnnnnnnnnnnnnnnnnnnnnnnnnnnnnnnnnnnnnnnnnnnnnnnnnnnnnnnnnnnnnnnnnnnnnnnnnnnnnnnnnnnnnnnnnnnnnnnnnnnnnnnnnnnnnnnnnnnnnnnnnnnnnnnnnnnnnnnnnnnnnnnnnnnnnnnnnnnnnnnnnnnnnnnnnnnnnnnnnnnnnnnnnnnnnnnnnnnnnnnnnnnnnnnnnnnnnnnnnnnnnnnnnnnnnnnnnnnnnnnnnnnnnnnnnnnnnnnnnnnnnnnnnnnnnnnnnnnnnnnnnnnnnnnnnnnnnnnnnnnnnnnnnnnnnnnnnnnnnnnnnnnnnnnnnnnnnnnnnnnnnnnnnnnnnnnnnnnnnnnnnnnnnnnnnnnnnnnnnnnnnnnnnnnnnnnnnnnnnnnnnnnnnnnnnnnnnnnnnnnnnnnnnnnnnnnnnnnnnnnnnnnnnnnnnnnnnnnnnnnnnnnnnnnnnnnnnnnnnnnnnnnnnnnnnnnnnnnnnnnnnnnnnnnnnnnnnnnnnnnnnnnnnnnnnnnnnnnnnnnnnnnnnnnnnnnnnnnnnnnnnnnnnnnnnnnnnnnnnnnnnnnnnnnnnnnnnnnnnnnnnnnnnnnnnnnnnnnnnnnnnnnnnnnnnnnnnnnnnnnnnnnnnnnnnnnnnnnnnnnnnnnnnnnnnnnnnnnnnnnnnnnnnnnnnnnnnnnnnnnnnnnnnnnnnnnnnnnnnnnnnnnnnnnnnnnnnnnnnnnnnnnnnnnnnnnnnnnnnnnnnnnnnnnnnnnnnnnnnnnnnnnnnnnnnnnnnnnnnnnnnnnnnnnnnnnnnnnnnnnnnnnnnnnnnnnnnnnnnnnnnnnnnnnnnnnnnnnnnnnnnnnnnnnnnnnnnnnnnnnnnnnnnnnnnnnnnnnnnnnnnnnnnnnnnnnnnnnnnnnnnnnnnnnnnnnnnnnnnnnnnnnnnnnnnnnnnnnnnnnnnnnnnnnnnnnnnnnnnnnnnnnnnnnnnnnnnnnnnnnnnnnnnnnnnnnnnnnnnnnnnnnnnnnnnnnnnnnnnnnnnnnnnnnnnnnnnnnnnnnnnnnnnnnnnnnnnnnnnnnnnnnnnnnnnnnnnnnnnnnnnnnnnnnnnnnnnnnnnnnnnnnnnnnnnnnnnnnnnnnnnnnnnnnnnnnnnnnnnnnnnnnnnnnnnnnnnnnnnnnnnnnnnnnnnnnnnnnnnnnnnnnnnnnnnnnnnnnnnnnnnnnnnnnnnnnnnnnnnnnnnnnnnnnnnnnnnnnnnnnnnnnnnnnnnnnnnnnnnnnnnnnnnnnnnnnnnnnnnnnnnnnnnnnnnnnnnnnnnnnnnnnnnnnnnnnnnnnnnnnnnnnnnnnnnnnnnnnnnnnnnnnnnnnnnnnnnnnnnnnnnnnnnnnnnnnnnnnnnnnnnnnnnnnnnnnnnnnnnnnnnnnnnnnnnnnnnnnnnnnnnnnnnnnnnnnnnnnnnnnnnnnnnnnnnnnnnnnnnnnnnnnnnnnnnnnnnnnnnnnnnnnnnnnnnnnnnnnnnnnnnnnnnnnnnnnnnnnnnnnnnnnnnnnnnnnnnnnnnnnnnnnnnnnnnnnnnnnnnnnnnnnnnnnnnnnnnnnnnnnnnnnnnnnnnnnnnnnnnnnnnnnnnnnnnnnnnnnnnnnnnnnnnnnnnnnnnnnnnnnnnnnnnnnnnnnnnnnnnnnnnnnnnnnnnnnnnnnnnnnnnnnnnnnnnnnnnnnnnnnnnnnnnnnnnnnnnnnnnnnnnnnnnnnnnnnnnnnnnnnnnnnnnnnnnnnnnnnnnnnnnnnnnnnnnnnnnnnnnnnnnnnnnnnnnnnnnnnnnnnnnnnnnnnnnnnnnnnnnnnnnnnnnnnnnnnnnnnnnnnnnnnnnnnnnnnnnnnnnnnnnnnnnnnnnnnnnnnnnnnnnnnnnnnnnnnnnnnnnnnnnnnnnnnnnnnnnnnnnnnnnnnnnnnnnnnnnnnnnnnnnnnnnnnnnnnnnnnnnnnnnnnnnnnnnnnnnnnnnnnnnnnnnnnnnnnnnnnnnnnnnnnnnnnnnnnnnnnnnnnnnnnnnnnnnnnnnnnnnnnnnnnnnnnnnnnnnnnnnnnnnnnnnnnnnnnnnnnnnnnnnnnnnnnnnnnnnnnnnnnnnnnnnnnnnnnnnnnnnnnnnnnnnnnnnnnnnnnnnnnnnnnnnnnnnnnnnnnnnnnnnnnnnnnnnnnnnnnnnnnnnnnnnnnnnnnnnnnnnnnnnnnnnnnnnnnnnnnnnnnnnnnnnnnnnnnnnnnnnnnnnnnnnnnnnnnnnnnnnnnnnnnnnnnnnnnnnnnnnnnnnnnnnnnnnnnnnnnnnnnnnnnnnnnnnnnnnnnnnnnnnnnnnnnnnnnnnnnnnnnnnnnnnnnnnnnnnnnnnnnnnnnnnnnnnnnnnnnnnnnnnnnnnnnnnnnnnnnnnnnnnnnnnnnnnnnnnnnnnnnnnnnnnnnnnnnnnnnnnnnnnnnnnnnnnnnnnnnnnnnnnnnnnnnnnnnnnnnnnnnnnnnnnnnnnnnnnnnnnnnnnnnnnnnnnnnnnnnnnnnnnnnnnnnnnnnnnnnnnnnnnnnnnnnnnnnnnnnnnnnnnnnnnnnnnnnnnnnnnnnnnnnnnnnnnnnnnnnnnnnnnnnnnnnnnnnnnnnnnnnnnnnnnnnnnnnnnnnnnnnnnnnnnnnnnnnnnnnnnnnnnnnnnnnnnnnnnnnnnnnnnnnnnnnnnnnnnnnnnnnnnnnnnnnnnnnnnnnnnnnnnnnnnnnnnnnnnnnnnnnnnnnnnnnnnnnnnnnnnnnnnnnnnnnnnnnnnnnnnnnnnnnnnnnnnnnnnnnnnnnnnnnnnnnnnnnnnnnnnnnnnnnnnnnnnnnnnnnnnnnnnnnnnnnnnnnnnnnnnnnnnnnnnnnnnnnnnnnnnnnnnnnnnnnnnnnnnnnnnnnnnnnnnnnnnnnnnnnnnnnnnnnnnnnnnnnnnnnnnnnnnnnnnnnnnnnnnnnnnnnnnnnnnnnnnnnnnnnnnnnnnnnnnnnnnnnnnnnnnnnnnnnnnnnnnnnnnnnnnnnnnnnnnnnnnnnnnnnnnnnnnnnnnnnnnnnnnnnnnnnnnnnnnnnnnnnnnnnnnnnnnnnnnnnnnnnnnnnnnnnnnnnnnnnnnnnnnnnnnnnnnnnnnnnnnnnnnnnnnnnnnnnnnnnnnnnnnnnnnnnnnnnnnnnnnnnnnnnnnnnnnnnnnnnnnnnnnnnnnnnnnnnnnnnnnnnnnnnnnnnnnnnnnnnnnnnnnnnnnnnnnnnnnnnnnnnnnnnnnnnnnnnnnnnnnnnnnnnnnnnnnnnnnnnnnnnnnnnnnnnnnnnnnnnnnnnnnnnnnnnnnnnnnnnnnnnnnnnnnnnnnnnnnnnnnnnnnnnnnnnnnnnnnnnnnnnnnnnnnnnnnnnnnnnnnnnnnnnnnnnnnnnnnnnnnnnnnnnnnnnnnnnnnnnnnnnnnnnnnnnnnnnnnnnnnnnnnnnnnnnnnnnnnnnnnnnnnnnnnnnnnnnnnnnnnnnnnnnnnnnnnnnnnnnnnnnnnnnnnnnnnnnnnnnnnnnnnnnnnnnnnnnnnnnnnnnnnnnnnnnnnnnnnnnnnnnnnnnnnnnnnnnnnnnnnnnnnnnnnnnnnnnnnnnnnnnnnnnnnnnnnnnnnnnnnnnnnnnnnnnnnnnnnnnnnnnnnnnnnnnnnnnnnnnnnnnnnnnnnnnnnnnnnnnnnnnnnnnnnnnnnnnnnnnnnnnnnnnnnnnnnnnnnnnnnnnnnnnnnnnnnnnnnnnnnnnnnnnnnnnnnnnnnnnnnnnnnnnnnnnnnnnnnnnnnnnnnnnnnnnnnnnnnnnnnnnnnnnnnnnnnnnnnnnnnnnnnnnnnnnnnnnnnnnnnnnnnnnnnnnnnnnnnnnnnnnnnnnnnnnnnnnnnnnnnnnnnnnnnnnnnnnnnnnnnnnnnnnnnnnnnnnnnnnnnnnnnnnnnnnnnnnnnnnnnnnnnnnnnnnnnnnnnnnnnnnnnnnnnnnnnnnnnnnnnnnnnnnnnnnnnnnnnnnnnnnnnnnnnnnnnnnnnnnnnnnnnnnnnnnnnnnnnnnnnnnnnnnnnnnnnnnnnnnnnnnnnnnnnnnnnnnnnnnnnnnnnnnnnnnnnnnnnnnnnnnnnnnnnnnnnnnnnnnnnnnnnnnnnnnnnnnnnnnnnnnnnnnnnnnnnnnnnnnnnnnnnnnnnnnnnnnnnnnnnnnnnnnnnnnnnnnnnnnnnnnnnnnnnnnnnnnnnnnnnnnnnnnnnnnnnnnnnnnnnnnnnnnnnnnnnnnnnnnnnnnnnnnnnnnnnnnnnnnnnnnnnnnnnnnnnnnnnnnnnnnnnnnnnnnnnnnnnnnnnnnnnnnnnnnnnnnnnnnnnnnnnnnnnnnnnnnnnnnnnnnnnnnnnnnnnnnnnnnnnnnnnnnnnnnnnnnnnnnnnnnnnnnnnnnnnnnnnnnnnnnnnnnnnnnnnnnnnnnnnnnnnnnnnnnnnnnnnnnnnnnnnnnnnnnnnnnnnnnnnnnnnnnnnnnnnnnnnnnnnnnnnnnnnnnnnnnnnnnnnnnnnnnnnnnnnnnnnnnnnnnnnnnnnnnnnnnnnnnnnnnnnnnnnnnnnnnnnnnnnnnnnnnnnnnnnnnnnnnnnnnnnnnnnnnnnnnnnnnnnnnnnnnnnnnnnnnnnnnnnnnnnnnnnnnnnnnnnnnnnnnnnnnnnnnnnnnnnnnnnnnnnnnnnnnnnnnnnnnnnnnnnnnnnnnnnnnnnnnnnnnnnnnnnnnnnnnnnnnnnnnnnnnnnnnnnnnnnnnnnnnnnnnnnnnnnnnnnnnnnnnnnnnnnnnnnnnnnnnnnnnnnnnnnnnnnnnnnnnnnnnnnnnnnnnnnnnnnnnnnnnnnnnnnnnnnnnnnnnnnnnnnnnnnnnnnnnnnnnnnnnnnnnnnnnnnnnnnnnnnnnnnnnnnnnnnnnnnnnnnnnnnnnnnnnnnnnnnnnnnnnnnnnnnnnnnnnnnnnnnnnnnnnnnnnnnnnnnnnnnnnnnnnnnnnnnnnnnnnnnnnnnnnnnnnnnnnnnnnnnnnnnnnnnnnnnnnnnnnnnnnnnnnnnnnnnnnnnnnnnnnnnnnnnnnnnnnnnnnnnnnnnnnnnnnnnnnnnnnnnnnnnnnnnnnnnnnnnnnnnnnnnnnnnnnnnnnnnnnnnnnnnnnnnnnnnnnnnnnnnnnnnnnnnnnnnnnnnnnnnnnnnnnnnnnnnnnnnnnnnnnnnnnnnnnnnnnnnnnnnnnnnnnnnnnnnnnnnnnnnnnnnnnnnnnnnnnnnnnnnnnnnnnnnnnnnnnnnnnnnnnnnnnnnnnnnnnnnnnnnnnnnnnnnnnnnnnnnnnnnnnnnnnnnnnnnnnnnnnnnnnnnnnnnnnnnnnnnnnnnnnnnnnnnnnnnnnnnnnnnnnnnnnnnnnnnnnnnnnnnnnnnnnnnnnnnnnnnnnnnnnnnnnnnnnnnnnnnnnnnnnnnnnnnnnnnnnnnnnnnnnnnnnnnnnnnnnnnnnnnnnnnnnnnnnnnnnnnnnnnnnnnnnnnnnnnnnnnnnnnnnnnnnnnnnnnnnnnnnnnnnnnnnnnnnnnnnnnnnnnnnnnnnnnnnnnnnnnnnnnnnnnnnnnnnnnnnnnnnnnnnnnnnnnnnnnnnnnnnnnnnnnnnnnnnnnnnnnnnnnnnnnnnnnnnnnnnnnnnnnnnnnnnnnnnnnnnnnnnnnnnnnnnnnnnnnnnnnnnnnnnnnnnnnnnnnnnnnnnnnnnnnnnnnnnnnnnnnnnnnnnnnnnnnnnnnnnnnnnnnnnnnnnnnnnnnnnnnnnnnnnnnnnnnnnnnnnnnnnnnnnnnnnnnnnnnnnnnnnnnnnnnnnnnnnnnnnnnnnnnnnnnnnnnnnnnnnnnnnnnnnnnnnnnnnnnnnnnnnnnnnnnnnnnnnnnnnnnnnnnnnnnnnnnnnnnnnnnnnnnnnnnnnnnnnnnnnnnnnnnnnnnnnnnnnnnnnnnnnnnnnnnnnnnnnnnnnnnnnnnnnnnnnnnnnnnnnnnnnnnnnnnnnnnnnnnnnnnnnnnnnnnnnnnnnnnnnnnnnnnnnnnnnnnnnnnnnnnnnnnnnnnnnnnnnnnnnnnnnnnnnnnnnnnnnnnnnnnnnnnnnnnnnnnnnnnnnnnnnnnnnnnnnnnnnnnnnnnnnnnnnnnnnnnnnnnnnnnnnnnnnnnnnnnnnnnnnnnnnnnnnnnnnnnnnnnnnnnnnnnnnnnnnnnnnnnnnnnnnnnnnnnnnnnnnnnnnnnnnnnnnnnnnnnnnnnnnnnnnnnnnnnnnnnnnnnnnnnnnnnnnnnnnnnnnnnnnnnnnnnnnnnnnnnnnnnnnnnnnnnnnnnnnnnnnnnnnnnnnnnnnnnnnnnnnnnnnnnnnnnnnnnnnnnnnnnnnnnnnnnnnnnnnnnnnnnnnnnnnnnnnnnnnnnnnnnnnnnnnnnnnnnnnnnnnnnnnnnnnnnnnnnnnnnnnnnnnnnnnnnnnnnnnnnnnnnnnnnnnnnnnnnnnnnnnnnnnnnnnnnnnnnnnnnnnnnnnnnnnnnnnnnnnnnnnnnnnnnnnnnnnnnnnnnnnnnnnnnnnnnnnnnnnnnnnnnnnnnnnnnnnnnnnnnnnnnnnnnnnnnnnnnnnnnnnnnnnnnnnnnnnnnnnnnnnnnnnnnnnnnnnnnnnnnnnnnnnnnnnnnnnnnnnnnnnnnnnnnnnnnnnnnnnnnnnnnnnnnnnnnnnnnnnnnnnnnnnnnnnnnnnnnnnnnnnnnnnnnnnnnnnnnnnnnnnnnnnnnnnnnnnnnnnnnnnnnnnnnnnnnnnnnnnnnnnnnnnnnnnnnnnnnnnnnnnnnnnnnnnnnnnnnnnnnnnnnnnnnnnnnnnnnnnnnnnnnnnnnnnnnnnnnnnnnnnnnnnnnnnnnnnnnnnnnnnnnnnnnnnnnnnnnnnnnnnnnnnnnnnnnnnnnnnnnnnnnnnnnnnnnnnnnnnnnnnnnnnnnnnnnnnnnnnnnnnnnnnnnnnnnnnnnnnnnnnnnnnnnnnnnnnnnnnnnnnnnnnnnnnnnnnnnnnnnnnnnnnnnnnnnnnnnnnnnnnnnnnnnnnnnnnnnnnnnnnnnnnnnnnnnnnnnnnnnnnnnnnnnnnnnnnnnnnnnnnnnnnnnnnnnnnnnnnnnnnnnnnnnnnnnnnnnnnnnnnnnnnnnnnnnnnnnnnnnnnnnnnnnnnnnnnnnnnnnnnnnnnnnnnnnnnnnnnnnnnnnnnnnnnnnnnnnnnnnnnnnnnnnnnnnnnnnnnnnnnnnnnnnnnnnnnnnnnnnnnnnnnnnnnnnnnnnnnnnnnnnnnnnnnnnnnnnnnnnnnnnnnnnnnnnnnnnnnnnnnnnnnnnnnnnnnnnnnnnnnnnnnnnnnnnnnnnnnnnnnnnnnnnnnnnnnnnnnnnnnnnnnnnnnnnnnnnnnnnnnnnnnnnnnnnnnnnnnnnnnnnnnnnnnnnnnnnnnnnnnnnnnnnnnnnnnnnnnnnnnnnnnnnnnnnnnnnnnnnnnnnnnnnnnnnnnnnnnnnnnnnnnnnnnnnnnnnnnnnnnnnnnnnnnnnnnnnnnnnnnnnnnnnnnnnnnnnnnnnnnnnnnnnnnnnnnnnnnnnnnnnnnnnnnnnnnnnnnnnnnnnnnnnnnnnnnnnnnnnnnnnnnnnnnnnnnnnnnnnnnnnnnnnnnnnnnnnnnnnnnnnnnnnnnnnnnnnnnnnnnnnnnnnnnnnnnnnnnnnnnnnnnnnnnnnnnnnnnnnnnnnnnnnnnnnnnnnnnnnnnnnnnnnnnnnnnnnnnnnnnnnnnnnnnnnnnnnnnnnnnnnnnnnnnnnnnnnnnnnnnnnnnnnnnnnnnnnnnnnnnnnnnnnnnnnnnnnnnnnnnnnnnnnnnnnnnnnnnnnnnnnnnnnnnnnnnnnnnnnnnnnnnnnnnnnnnnnnnnnnnnnnnnnnnnnnnnnnnnnnnnnnnnnnnnnnnnnnnnnnnnnnnnnnnnnnnnnnnnnnnnnnnnnnnnnnnnnnnnnnnnnnnnnnnnnnnnnnnnnnnnnnnnnnnnnnnnnnnnnnnnnnnnnnnnnnnnnnnnnnnnnnnnnnnnnnnnnnnnnnnnnnnnnnnnnnnnnnnnnnnnnnnnnnnnnnnnnnnnnnnnnnnnnnnnnnnnnnnnnnnnnnnnnnnnnnnnnnnnnnnnnnnnnnnnnnnnnnnnnnnnnnnnnnnnnnnnnnnnnnnnnnnnnnnnnnnnnnnnnnnnnnnnnnnnnnnnnnnnnnnnnnnnnnnnnnnnnnnnnnnnnnnnnnnnnnnnnnnnnnnnnnnnnnnnnnnnnnnnnnnnnnnnnnnnnnnnnnnnnnnnnnnnnnnnnnnnnnnnnnnnnnnnnnnnnnnnnnnnnnnnnnnnnnnnnnnnnnnnnnnnnnnnnnnnnnnnnnnnnnnnnnnnnnnnnnnnnnnnnnnnnnnnnnnnnnnnnnnnnnnnnnnnnnnnnnnnnnnnnnnnnnnnnnnnnnnnnnnnnnnnnnnnnnnnnnnnnnnnnnnnnnnnnnnnnnnnnnnnnnnnnnnnnnnnnnnnnnnnnnnnnnnnnnnnnnnnnnnnnnnnnnnnnnnnnnnnnnnnnnnnnnnnnnnnnnnnnnnnnnnnnnnnnnnnnnnnnnnnnnnnnnnnnnnnnnnnnnnnnnnnnnnnnnnnnnnnnnnnnnnnnnnnnnnnnnnnnnnnnnnnnnnnnnnnnnnnnnnnnnnnnnnnnnnnnnnnnnnnnnnnnnnnnnnnnnnnnnnnnnnnnnnnnnnnnnnnnnnnnnnnnnnnnnnnnnnnnnnnnnnnnnnnnnnnnnnnnnnnnnnnnnnnnnnnnnnnnnnnnnnnnnnnnnnnnnnnnnnnnnnnnnnnnnnnnnnnnnnnnnnnnnnnnnnnnnnnnnnnnnnnnnnnnnnnnnnnnnnnnnnnnnnnnnnnnnnnnnnnnnnnnnnnnnnnnnnnnnnnnnnnnnnnnnnnnnnnnnnnnnnnnnnnnnnnnnnnnnnnnnnnnnnnnnnnnnnnnnnnnnnnnnnnnnnnnnnnnnnnnnnnnnnnnnnnnnnnnnnnnnnnnnnnnnnnnnnnnnnnnnnnnnnnnnnnnnnnnnnnnnnnnnnnnnnnnnnnnnnnnnnnnnnnnnnnnnnnnnnnnnnnnnnnnnnnnnnnnnnnnnnnnnnnnnnnnnnnnnnnnnnnnnnnnnnnnnnnnnnnnnnnnnnnnnnnnnnnnnnnnnnnnnnnnnnnnnnnnnnnnnnnnnnnnnnnnnnnnnnnnnnnnnnnnnnnnnnnnnnnnnnnnnnnnnnnnnnnnnnnnnnnnnnnnnnnnnnnnnnnnnnnnnnnnnnnnnnnnnnnnnnnnnnnnnnnnnnnnnnnnnnnnnnnnnnnnnnnnnnnnnnnnnnnnnnnnnnnnnnnnnnnnnnnnnnnnnnnnnnnnnnnnnnnnnnnnnnnnnnnnnnnnnnnnnnnnnnnnnnnnnnnnnnnnnnnnnnnnnnnnnnnnnnnnnnnnnnnnnnnnnnnnnnnnnnnnnnnnnnnnnnnnnnnnnnnnnnnnnnnnnnnnnnnnnnnnnnnnnnnnnnnnnnnnnnnnnnnnnnnnnnnnnnnnnnnnnnnnnnnnnnnnnnnnnnnnnnnnnnnnnnnnnnnnnnnnnnnnnnnnnnnnnnnnnnnnnnnnnnnnnnnnnnnnnnnnnnnnnnnnnnnnnnnnnnnnnnnnnnnnnnnnnnnnnnnnnnnnnnnnnnnnnnnnnnnnnnnnnnnnnnnnnnnnnnnnnnnnnnnnnnnnnnnnnnnnnnnnnnnnnnnnnnnnnnnnnnnnnnnnnnnnnnnnnnnnnnnnnnnnnnnnnnnnnnnnnnnnnnnnnnnnnnnnnnnnnnnnnnnnnnnnnnnnnnnnnnnnnnnnnnnnnnnnnnnnnnnnnnnnnnnnnnnnnnnnnnnnnnnnnnnnnnnnnnnnnnnnnnnnnnnnnnnnnnnnnnnnnnnnnnnnnnnnnnnnnnnnnnnnnnnnnnnnnnnnnnnnnnnnnnnnnnnnnnnnnnnnnnnnnnnnnnnnnnnnnnnnnnnnnnnnnnnnnnnnnnnnnnnnnnnnnnnnnnnnnnnnnnnnnnnnnnnnnnnnnnnnnnnnnnnnnnnnnnnnnnnnnnnnnnnnnnnnnnnnnnnnnnnnnnnnnnnnnnnnnnnnnnnnnnnnnnnnnnnnnnnnnnnnnnnnnnnnnnnnnnnnnnnnnnnnnnnnnnnnnnnnnnnnnnnnnnnnnnnnnnnnnnnnnnnnnnnnnnnnnnnnnnnnnnnnnnnnnnnnnnnnnnnnnnnnnnnnnnnnnnnnnnnnnnnnnnnnnnnnnnnnnnnnnnnnnnnnnnnnnnnnnnnnnnnnnnnnnnnnnnnnnnnnnnnnnnnnnnnnnnnnnnnnnnnnnnnnnnnnnnnnnnnnnnnnnnnnnnnnnnnnnnnnnnnnnnnnnnnnnnnnnnnnnnnnnnnnnnnnnnnnnnnnnnnnnnnnnnnnnnnnnnnnnnnnnnnnnnnnnnnnnnnnnnnnnnnnnnnnnnnnnnnnnnnnnnnnnnnnnnnnnnnnnnnnnnnnnnnnnnnnnnnnnnnnnnnnnnnnnnnnnnnnnnnnnnnnnnnnnnnnnnnnnnnnnnnnnnnnnnnnnnnnnnnnnnnnnnnnnnnnnnnnnnnnnnnnnnnnnnnnnnnnnnnnnnnnnnnnnnnnnnnnnnnnnnnnnnnnnnnnnnnnnnnnnnnnnnnnnnnnnnnnnnnnnnnnnnnnnnnnnnnnnnnnnnnnnnnnnnnnnnnnnnnnnnnnnnnnnnnnnnnnnnnnnnnnnnnnnnnnnnnnnnnnnnnnnnnnnnnnnnnnnnnnnnnnnnnnnnnnnnnnnnnnnnnnnnnnnnnnnnnnnnnnnnnnnnnnnnnnnnnnnnnnnnnnnnnnnnnnnnnnnnnnnnnnnnnnnnnnnnnnnnnnnnnnnnnnnnnnnnnnnnnnnnnnnnnnnnnnnnnnnnnnnnnnnnnnnnnnnnnnnnnnnnnnnnnnnnnnnnnnnnnnnnnnnnnnnnnnnnnnnnnnnnnnnnnnnnnnnnnnnnnnnnnnnnnnnnnnnnnnnnnnnnnnnnnnnnnnnnnnnnnnnnnnnnnnnnnnnnnnnnnnnnnnnnnnnnnnnnnnnnnnnnnnnnnnnnnnnnnnnnnnnnnnnnnnnnnnnnnnnnnnnnnnnnnnnnnnnnnnnnnnnnnnnnnnnnnnnnnnnnnnnnnnnnnnnnnnnnnnnnnnnnnnnnnnnnnnnnnnnnnnnnnnnnnnnnnnnnnnnnnnnnnnnnnnnnnnnnnnnnnnnnnnnnnnnnnnnnnnnnnnnnnnnnnnnnnnnnnnnnnnnnnnnnnnnnnnnnnnnnnnnnnnnnnnnnnnnnnnnnnnnnnnnnnnnnnnnnnnnnnnnnnnnnnnnnnnnnnnnnnnnnnnnnnnnnnnnnnnnnnnnnnnnnnnnnnnnnnnnnnnnnnnnnnnnnnnnnnnnnnnnnnnnnnnnnnnnnnnnnnnnnnnnnnnnnnnnnnnnnnnnnnnnnnnnnnnnnnnnnnnnnnnnnnnnnnnnnnnnnnnnnnnnnnnnnnnnnnnnnnnnnnnnnnnnnnnnnnnnnnnnnnnnnnnnnnnnnnnnnnnnnnnnnnnnnnnnnnnnnnnnnnnnnnnnnnnnnnnnnnnnnnnnnnnnnnnnnnnnnnnnnnnnnnnnnnnnnnnnnnnnnnnnnnnnnnnnnnnnnnnnnnnnnnnnnnnnnnnnnnnnnnnnnnnnnnnnnnnnnnnnnnnnnnnnnnnnnnnnnnnnnnnnnnnnnnnnnnnnnnnnnnnnnnnnnnnnnnnnnnnnnnnnnnnnnnnnnnnnnnnnnnnnnnnnnnnnnnnnnnnnnnnnnnnnnnnnnnnnnnnnnnnnnnnnnnnnnnnnnnnnnnnnnnnnnnnnnnnnnnnnnnnnnnnnnnnnnnnnnnnnnnnnnnnnnnnnnnnnnnnnnnnnnnnnnnnnnnnnnnnnnnnnnnnnnnnnnnnnnnnnnnnnnnnnnnnnnnnnnnnnnnnnnnnnnnnnnnnnnnnnnnnnnnnnnnnnnnnnnnnnnnnnnnnnnnnnnnnnnnnnnnnnnnnnnnnnnnnnnnnnnnnnnnnnnnnnnnnnnnnnnnnnnnnnnnnnnnnnnnnnnnnnnnnnnnnnnnnnnnnnnnnnnnnnnnnnnnnnnnnnnnnnnnnnnnnnnnnnnnnnnnnnnnnnnnnnnnnnnnnnnnnnnnnnnnnnnnnnnnnnnnnnnnnnnnnnnnnnnnnnnnnnnnnnnnnnnnnnnnnnnnnnnnnnnnnnnnnnnnnnnnnnnnnnnnnnnnnnnnnnnnnnnnnnnnnnnnnnnnnnnnnnnnnnnnnnnnnnnnnnnnnnnnnnnnnnnnnnnnnnnnnnnnnnnnnnnnnnnnnnnnnnnnnnnnnnnnnnnnnnnnnnnnnnnnnnnnnnnnnnnnnnnnnnnnnnnnnnnnnnnnnnnnnnnnnnnnnnnnnnnnnnnnnnnnnnnnnnnnnnnnnnnnnnnnnnnnnnnnnnnnnnnnnnnnnnnnnnnnnnnnnnnnnnnnnnnnnnnnnnnnnnnnnnnnnnnnnnnnnnnnnnnnnnnnnnnnnnnnnnnnnnnnnnnnnnnnnnnnnnnnnnnnnnnnnnnnnnnnnnnnnnnnnnnnnnnnnnnnnnnnnnnnnnnnnnnnnnnnnnnnnnnnnnnnnnnnnnnnnnnnnnnnnnnnnnnnnnnnnnnnnnnnnnnnnnnnnnnnnnnnnnnnnnnnnnnnnnnnnnnnnnnnnnnnnnnnnnnnnnnnnnnnnnnnnnnnnnnnnnnnnnnnnnnnnnnnnnnnnnnnnnnnnnnnnnnnnnnnnnnnnnnnnnnnnnnnnnnnnnnnnnnnnnnnnnnnnnnnnnnnnnnnnnnnnnnnnnnnnnnnnnnnnnnnnnnnnnnnnnnnnnnnnnnnnnnnnnnnnnnnnnnnnnnnnnnnnnnnnnnnnnnnnnnnnnnnnnnnnnnnnnnnnnnnnnnnnnnnnnnnnnnnnnnnnnnnnnnnnnnnnnnnnnnnnnnnnnnnnnnnnnnnnnnnnnnnnnnnnnnnnnnnnnnnnnnnnnnnnnnnnnnnnnnnnnnnnnnnnnnnnnnnnnnnnnnnnnnnnnnnnnnnnnnnnnnnnnnnnnnnnnnnnnnnnnnnnnnnnnnnnnnnnnnnnnnnnnnnnnnnnnnnnnnnnnnnnnnnnnnnnnnnnnnnnnnnnnnnnnnnnnnnnnnnnnnnnnnnnnnnnnnnnnnnnnnnnnnnnnnnnnnnnnnnnnnnnnnnnnnnnnnnnnnnnnnnnnnnnnnnnnnnnnnnnnnnnnnnnnnnnnnnnnnnnnnnnnnnnnnnnnnnnnnnnnnnnnnnnnnnnnnnnnnnnnnnnnnnnnnnnnnnnnnnnnnnnnnnnnnnnnnnnnnnnnnnnnnnnnnnnnnnnnnnnnnnnnnnnnnnnnnnnnnnnnnnnnnnnnnnnnnnnnnnnnnnnnnnnnnnnnnnnnnnnnnnnnnnnnnnnnnnnnnnnnnnnnnnnnnnnnnnnnnnnnnnnnnnnnnnnnnnnnnnnnnnnnnnnnnnnnnnnnnnnnnnnnnnnnnnnnnnnnnnnnnnnnnnnnnnnnnnnnnnnnnnnnnnnnnnnnnnnnnnnnnnnnnnnnnnnnnnnnnnnnnnnnnnnnnnnnnnnnnnnnnnnnnnnnnnnnnnnnnnnnnnnnnnnnnnnnnnnnnnnnnnnnnnnnnnnnnnnnnnnnnnnnnnnnnnnnnnnnnnnnnnnnnnnnnnnnnnnnnnnnnnnnnnnnnnnnnnnnnnnnnnnnnnnnnnnnnnnnnnnnnnnnnnnnnnnnnnnnnnnnnnnnnnnnnnnnnnnnnnnnnnnnnnnnnnnnnnnnnnnnnnnnnnnnnnnnnnnnnnnnnnnnnnnnnnnnnnnnnnnnnnnnnnnnnnnnnnnnnnnnnnnnnnnnnnnnnnnnnnnnnnnnnnnnnnnnnnnnnnnnnnnnnnnnnnnnnnnnnnnnnnnnnnnnnnnnnnnnnnnnnnnnnnnnnnnnnnnnnnnnnnnnnnnnnnnnnnnnnnnnnnnnnnnnnnnnnnnnnnnnnnnnnnnnnnnnnnnnnnnnnnnnnnnnnnnnnnnnnnnnnnnnnnnnnnnnnnnnnnnnnnnnnnnnnnnnnnnnnnnnnnnnnnnnnnnnnnnnnnnnnnnnnnnnnnnnnnnnnnnnnnnnnnnnnnnnnnnnnnnnnnnnnnnnnnnnnnnnnnnnnnnnnnnnnnnnnnnnnnnnnnnnnnnnnnnnnnnnnnnnnnnnnnnnnnnnnnnnnnnnnnnnnnnnnnnnnnnnnnnnnnnnnnnnnnnnnnnnnnnnnnnnnnnnnnnnnnnnnnnnnnnnnnnnnnnnnnnnnnnnnnnnnnnnnnnnnnnnnnnnnnnnnnnnnnnnnnnnnnnnnnnnnnnnnnnnnnnnnnnnnnnnnnnnnnnnnnnnnnnnnnnnnnnnnnnnnnnnnnnnnnnnnnnnnnnnnnnnnnnnnnnnnnnnnnnnnnnnnnnnnnnnnnnnnnnnnnnnnnnnnnnnnnnnnnnnnnnnnnnnnnnnnnnnnnnnnnnnnnnnnnnnnnnnnnnnnnnnnnnnnnnnnnnnnnnnnnnnnnnnnnnnnnnnnnnnnnnnnnnnnnnnnnnnnnnnnnnnnnnnnnnnnnnnnnnnnnnnnnnnnnnnnnnnnnnnnnnnnnnnnnnnnnnnnnnnnnnnnnnnnnnnnnnnnnnnnnnnnnnnnnnnnnnnnnnnnnnnnnnnnnnnnnnnnnnnnnnnnnnnnnnnnnnnnnnnnnnnnnnnnnnnnnnnnnnnnnnnnnnnnnnnnnnnnnnnnnnnnnnnnnnnnnnnnnnnnnnnnnnnnnnnnnnnnnnnnnnnnnnnnnnnnnnnnnnnnnnnnnnnnnnnnnnnnnnnnnnnnnnnnnnnnnnnnnnnnnnnnnnnnnnnnnnnnnnnnnnnnnnnnnnnnnnnnnnnnnnnnnnnnnnnnnnnnnnnnnnnnnnnnnnnnnnnnnnnnnnnnnnnnnnnnnnnnnnnnnnnnnnnnnnnnnnnnnnnnnnnnnnnnnnnnnnnnnnnnnnnnnnnnnnnnnnnnnnnnnnnnnnnnnnnnnnnnnnnnnnnnnnnnnnnnnnnnnnnnnnnnnnnnnnnnnnnnnnnnnnnnnnnnnnnnnnnnnnnnnnnnnnnnnnnnnnnnnnnnnnnnnnnnnnnnnnnnnnnnnnnnnnnnnnnnnnnnnnnnnnnnnnnnnnnnnnnnnnnnnnnnnnnnnnnnnnnnnnnnnnnnnnnnnnnnnnnnnnnnnnnnnnnnnnnnnnnnnnnnnnnnnnnnnnnnnnnnnnnnnnnnnnnnnnnnnnnnnnnnnnnnnnnnnnnnnnnnnnnnnnnnnnnnnnnnnnnnnnnnnnnnnnnnnnnnnnnnnnnnnnnnnnnnnnnnnnnnnnnnnnnnnnnnnnnnnnnnnnnnnnnnnnnnnnnnnnnnnnnnnnnnnnnnnnnnnnnnnnnnnnnnnnnnnnnnnnnnnnnnnnnnnnnnnnnnnnnnnnnnnnnnnnnnnnnnnnnnnnnnnnnnnnnnnnnnnnnnnnnnnnnnnnnnnnnnnnnnnnnnnnnnnnnnnnnnnnnnnnnnnnnnnnnnnnnnnnnnnnnnnnnnnnnnnnnnnnnnnnnnnnnnnnnnnnnnnnnnnnnnnnnnnnnnnnnnnnnnnnnnnnnnnnnnnnnnnnnnnnnnnnnnnnnnnnnnnnnnnnnnnnnnnnnnnnnnnnnnnnnnnnnnnnnnnnnnnnnnnnnnnnnnnnnnnnnnnnnnnnnnnnnnnnnnnnnnnnnnnnnnnnnnnnnnnnnnnnnnnnnnnnnnnnnnnnnnnnnnnnnnnnnnnnnnnnnnnnnnnnnnnnnnnnnnnnnnnnnnnnnnnnnnnnnnnnnnnnnnnnnnnnnnnnnnnnnnnnnnnnnnnnnnnnnnnnnnnnnnnnnnnnnnnnnnnnnnnnnnnnnnnnnnnnnnnnnnnnnnnnnnnnnnnnnnnnnnnnnnnnnnnnnnnnnnnnnnnnnnnnnnnnnnnnnnnnnnnnnnnnnnnnnnnnnnnnnnnnnnnnnnnnnnnnnnnnnnnnnnnnnnnnnnnnnnnnnnnnnnnnnnnnnnnnnnnnnnnnnnnnnnnnnnnnnnnnnnnnnnnnnnnnnnnnnnnnnnnnnnnnnnnnnnnnnnnnnnnnnnnnnnnnnnnnnnnnnnnnnnnnnnnnnnnnnnnnnnnnnnnnnnnnnnnnnnnnnnnnnnnnnnnnnnnnnnnnnnnnnnnnnnnnnnnnnnnnnnnnnnnnnnnnnnnnnnnnnnnnnnnnnnnnnnnnnnnnnnnnnnnnnnnnnnnnnnnnnnnnnnnnnnnnnnnnnnnnnnnnnnnnnnnnnnnnnnnnnnnnnnnnnnnnnnnnnnnnnnnnnnnnnnnnnnnnnnnnnnnnnnnnnnnnnnnnnnnnnnnnnnnnnnnnnnnnnnnnnnnnnnnnnnnnnnnnnnnnnnnnnnnnnnnnnnnnnnnnnnnnnnnnnnnnnnnnnnnnnnnnnnnnnnnnnnnnnnnnnnnnnnnnnnnnnnnnnnnnnnnnnnnnnnnnnnnnnnnnnnnnnnnnnnnnnnnnnnnnnnnnnnnnnnnnnnnnnnnnnnnnnnnnnnnnnnnnnnnnnnnnnnnnnnnnnnnnnnnnnnnnnnnnnnnnnnnnnnnnnnnnnnnnnnnnnnnnnnnnnnnnnnnnnnnnnnnnnnnnnnnnnnnnnnnnnnnnnnnnnnnnnnnnnnnnnnnnnnnnnnnnnnnnnnnnnnnnnnnnnnnnnnnnnnnnnnnnnnnnnnnnnnnnnnnnnnnnnnnnnnnnnnnnnnnnnnnnnnnnnnnnnnnnnnnnnnnnnnnnnnnnnnnnnnnnnnnnnnnnnnnnnnnnnnnnnnnnnnnnnnnnnnnnnnnnnnnnnnnnnnnnnnnnnnnnnnnnnnnnnnnnnnnnnnnnnnnnnnnnnnnnnnnnnnnnnnnnnnnnnnnnnnnnnnnnnnnnnnnnnnnnnnnnnnnnnnnnnnnnnnnnnnnnnnnnnnnnnnnnnnnnnnnnnnnnnnnnnnnnnnnnnnnnnnnnnnnnnnnnnnnnnnnnnnnnnnnnnnnnnnnnnnnnnnnnnnnnnnnnnnnnnnnnnnnnnnnnnnnnnnnnnnnnnnnnnnnnnnnnnnnnnnnnnnnnnnnnnnnnnnnnnnnnnnnnnnnnnnnnnnnnnnnnnnnnnnnnnnnnnnnnnnnnnnnnnnnnnnnnnnnnnnnnnnnnnnnnnnnnnnnnnnnnnnnnnnnnnnnnnnnnnnnnnnnnnnnnnnnnnnnnnnnnnnnnnnnnnnnnnnnnnnnnnnnnnnnnnnnnnnnnnnnnnnnnnnnnnnnnnnnnnnnnnnnnnnnnnnnnnnnnnnnnnnnnnnnnnnnnnnnnnnnnnnnnnnnnnnnnnnnnnnnnnnnnnnnnnnnnnnnnnnnnnnnnnnnnnnnnnnnnnnnnnnnnnnnnnnnnnnnnnnnnnnnnnnnnnnnnnnnnnnnnnnnnnnnnnnnnnnnnnnnnnnnnnnnnnnnnnnnnnnnnnnnnnnnnnnnnnnnnnnnnnnnnnnnnnnnnnnnnnnnnnnnnnnnnnnnnnnnnnnnnnnnnnnnnnnnnnnnnnnnnnnnnnnnnnnnnnnnnnnnnnnnnnnnnnnnnnnnnnnnnnnnnnnnnnnnnnnnnnnnnnnnnnnnnnnnnnnnnnnnnnnnnnnnnnnnnnnnnnnnnnnnnnnnnnnnnnnnnnnnnnnnnnnnnnnnnnnnnnnnnnnnnnnnnnnnnnnnnnnnnnnnnnnnnnnnnnnnnnnnnnnnnnnnnnnnnnnnnnnnnnnnnnnnnnnnnnnnnnnnnnnnnnnnnnnnnnnnnnnnnnnnnnnnnnnnnnnnnnnnnnnnnnnnnnnnnnnnnnnnnnnnnnnnnnnnnnnnnnnnnnnnnnnnnnnnnnnnnnnnnnnnnnnnnnnnnnnnnnnnnnnnnnnnnnnnnnnnnnnnnnnnnnnnnnnnnnnnnnnnnnnnnnnnnnnnnnnnnnnnnnnnnnnnnnnnnnnnnnnnnnnnnnnnnnnnnnnnnnnnnnnnnnnnnnnnnnnnnnnnnnnnnnnnnnnnnnnnnnnnnnnnnnnnnnnnnnnnnnnnnnnnnnnnnnnnnnnnnnnnnnnnnnnnnnnnnnnnnnnnnnnnnnnnnnnnnnnnnnnnnnnnnnnnnnnnnnnnnnnnnnnnnnnnnnnnnnnnnnnnnnnnnnnnnnnnnnnnnnnnnnnnnnnnnnnnnnnnnnnnnnnnnnnnnnnnnnnnnnnnnnnnnnnnnnnnnnnnnnnnnnnnnnnnnnnnnnnnnnnnnnnnnnnnnnnnnnnnnnnnnnnnnnnnnnnnnnnnnnnnnnnnnnnnnnnnnnnnnnnnnnnnnnnnnnnnnnnnnnnnnnnnnnnnnnnnnnnnnnnnnnnnnnnnnnnnnnnnnnnnnnnnnnnnnnnnnnnnnnnnnnnnnnnnnnnnnnnnnnnnnnnnnnnnnnnnnnnnnnnnnnnnnnnnnnnnnnnnnnnnnnnnnnnnnnnnnnnnnnnnnnnnnnnnnnnnnnnnnnnnnnnnnnnnnnnnnnnnnnnnnnnnnnnnnnnnnnnnnnnnnnnnnnnnnnnnnnnnnnnnnnnnnnnnnnnnnnnnnnnnnnnnnnnnnnnnnnnnnnnnnnnnnnnnnnnnnnnnnnnnnnnnnnnnnnnnnnnnnnnnnnnnnnnnnnnnnnnnnnnnnnnnnnnnnnnnnnnnnnnnnnnnnnnnnnnnnnnnnnnnnnnnnnnnnnnnnnnnnnnnnnnnnnnnnnnnnnnnnnnnnnnnnnnnnnnnnnnnnnnnnnnnnnnnnnnnnnnnnnnnnnnnnnnnnnnnnnnnnnnnnnnnnnnnnnnnnnnnnnnnnnnnnnnnnnnnnnnnnnnnnnnnnnnnnnnnnnnnnnnnnnnnnnnnnnnnnnnnnnnnnnnnnnnnnnnnnnnnnnnnnnnnnnnnnnnnnnnnnnnnnnnnnnnnnnnnnnnnnnnnnnnnnnnnnnnnnnnnnnnnnnnnnnnnnnnnnnnnnnnnnnnnnnnnnnnnnnnnnnnnnnnnnnnnnnnnnnnnnnnnnnnnnnnnnnnnnnnnnnnnnnnnnnnnnnnnnnnnnnnnnnnnnnnnnnnnnnnnnnnnnnnnnnnnnnnnnnnnnnnnnnnnnnnnnnnnnnnnnnnnnnnnnnnnnnnnnnnnnnnnnnnnnnnnnnnnnnnnnnnnnnnnnnnnnnnnnnnnnnnnnnnnnnnnnnnnnnnnnnnnnnnnnnnnnnnnnnnnnnnnnnnnnnnnnnnnnnnnnnnnnnnnnnnnnnnnnnnnnnnnnnnnnnnnnnnnnnnnnnnnnnnnnnnnnnnnnnnnnnnnnnnnnnnnnnnnnnnnnnnnnnnnnnnnnnnnnnnnnnnnnnnnnnnnnnnnnnnnnnnnnnnnnnnnnnnnnnnnnnnnnnnnnnnnnnnnnnnnnnnnnnnnnnnnnnnnnnnnnnnnnnnnnnnnnnnnnnnnnnnnnnnnnnnnnnnnnnnnnnnnnnnnnnnnnnnnnnnnnnnnnnnnnnnnnnnnnnnnnnnnnnnnnnnnnnnnnnnnnnnnnnnnnnnnnnnnnnnnnnnnnnnnnnnnnnnnnnnnnnnnnnnnnnnnnnnnnnnnnnnnnnnnnnnnnnnnnnnnnnnnnnnnnnnnnnnnnnnnnnnnnnnnnnnnnnnnnnnnnnnnnnnnnnnnnnnnnnnnnnnnnnnnnnnnnnnnnnnnnnnnnnnnnnnnnnnnnnnnnnnnnnnnnnnnnnnnnnnnnnnnnnnnnnnnnnnnnnnnnnnnnnnnnnnnnnnnnnnnnnnnnnnnnnnnnnnnnnnnnnnnnnnnnnnnnnnnnnnnnnnnnnnnnnnnnnnnnnnnnnnnnnnnnnnnnnnnnnnnnnnnnnnnnnnnnnnnnnnnnnnnnnnnnnnnnnnnnnnnnnnnnnnnnnnnnnnnnnnnnnnnnnnnnnnnnnnnnnnnnnnnnnnnnnnnnnnnnnnnnnnnnnnnnnnnnnnnnnnnnnnnnnnnnnnnnnnnnnnnnnnnnnnnnnnnnnnnnnnnnnnnnnnnnnnnnnnnnnnnnnnnnnnnnnnnnnnnnnnnnnnnnnnnnnnnnnnnnnnnnnnnnnnnnnnnnnnnnnnnnnnnnnnnnnnnnnnnnnnnnnnnnnnnnnnnnnnnnnnnnnnnnnnnnnnnnnnnnnnnnnnnnnnnnnnnnnnnnnnnnnnnnnnnnnnnnnnnnnnnnnnnnnnnnnnnnnnnnnnnnnnnnnnnnnnnnnnnnnnnnnnnnnnnnnnnnnnnnnnnnnnnnnnnnnnnnnnnnnnnnnnnnnnnnnnnnnnnnnnnnnnnnnnnnnnnnnnnnnnnnnnnnnnnnnnnnnnnnnnnnnnnnnnnnnnnnnnnnnnnnnnnnnnnnnnnnnnnnnnnnnnnnnnnnnnnnnnnnnnnnnnnnnnnnnnnnnnnnnnnnnnnnnnnnnnnnnnnnnnnnnnnnnnnnnnnnnnnnnnnnnnnnnnnnnnnnnnnnnnnnnnnnnnnnnnnnnnnnnnnnnnnnnnnnnnnnnnnnnnnnnnnnnnnnnnnnnnnnnnnnnnnnnnnnnnnnnnnnnnnnnnnnnnnnnnnnnnnnnnnnnnnnnnnnnnnnnnnnnnnnnnnnnnnnnnnnnnnnnnnnnnnnnnnnnnnnnnnnnnnnnnnnnnnnnnnnnnnnnnnnnnnnnnnnnnnnnnnnnnnnnnnnnnnnnnnnnnnnnnnnnnnnnnnnnnnnnnnnnnnnnnnnnnnnnnnnnnnnnnnnnnnnnnnnnnnnnnnnnnnnnnnnnnnnnnnnnnnnnnnnnnnnnnnnnnnnnnnnnnnnnnnnnnnnnnnnnnnnnnnnnnnnnnnnnnnnnnnnnnnnnnnnnnnnnnnnnnnnnnnnnnnnnnnnnnnnnnnnnnnnnnnnnnnnnnnnnnnnnnnnnnnnnnnnnnnnnnnnnnnnnnnnnnnnnnnnnnnnnnnnnnnnnnnnnnnnnnnnnnnnnnnnnnnnnnnnnnnnnnnnnnnnnnnnnnnnnnnnnnnnnnnnnnnnnnnnnnnnnnnnnnnnnnnnnnnnnnnnnnnnnnnnnnnnnnnnnnnnnnnnnnnnnnnnnnnnnnnnnnnnnnnnnnnnnnnnnnnnnnnnnnnnnnnnnnnnnnnnnnnnnnnnnnnnnnnnnnnnnnnnnnnnnnnnnnnnnnnnnnnnnnnnnnnnnnnnnnnnnnnnnnnnnnnnnnnnnnnnnnnnnnnnnnnnnnnnnnnnnnnnnnnnnnnnnnnnnnnnnnnnnnnnnnnnnnnnnnnnnnnnnnnnnnnnnnnnnnnnnnnnnnnnnnnnnnnnnnnnnnnnnnnnnnnnnnnnnnnnnnnnnnnnnnnnnnnnnnnnnnnnnnnnnnnnnnnnnnnnnnnnnnnnnnnnnnnnnnnnnnnnnnnnnnnnnnnnnnnnnnnnnnnnnnnnnnnnnnnnnnnnnnnnnnnnnnnnnnnnnnnnnnnnnnnnnnnnnnnnnnnnnnnnnnnnnnnnnnnnnnnnnnnnnnnnnnnnnnnnnnnnnnnnnnnnnnnnnnnnnnnnnnnnnnnnnnnnnnnnnnnnnnnnnnnnnnnnnnnnnnnnnnnnnnnnnnnnnnnnnnnnnnnnnnnnnnnnnnnnnnnnnnnnnnnnnnnnnnnnnnnnnnnnnnnnnnnnnnnnnnnnnnnnnnnnnnnnnnnnnnnnnnnnnnnnnnnnnnnnnnnnnnnnnnnnnnnnnnnnnnnnnnnnnnnnnnnnnnnnnnnnnnnnnnnnnnnnnnnnnnnnnnnnnnnnnnnnnnnnnnnnnnnnnnnnnnnnnnnnnnnnnnnnnnnnnnnnnnnnnnnnnnnnnnnnnnnnnnnnnnnnnnnnnnnnnnnnnnnnnnnnnnnnnnnnnnnnnnnnnnnnnnnnnnnnnnnnnnnnnnnnnnnnnnnnnnnnnnnnnnnnnnnnnnnnnnnnnnnnnnnnnnnnnnnnnnnnnnnnnnnnnnnnnnnnnnnnnnnnnnnnnnnnnnnnnnnnnnnnnnnnnnnnnnnnnnnnnnnnnnnnnnnnnnnnnnnnnnnnnnnnnnnnnnnnnnnnnnnnnnnnnnnnnnnnnnnnnnnnnnnnnnnnnnnnnnnnnnnnnnnnnnnnnnnnnnnnnnnnnnnnnnnnnnnnnnnnnnnnnnnnnnnnnnnnnnnnnnnnnnnnnnnnnnnnnnnnnnnnnnnnnnnnnnnnnnnnnnnnnnnnnnnnnnnnnnnnnnnnnnnnnnnnnnnnnnnnnnnnnnnnnnnnnnnnnnnnnnnnnnnnnnnnnnnnnnnnnnnnnnnnnnnnnnnnnnnnnnnnnnnnnnnnnnnnnnnnnnnnnnnnnnnnnnnnnnnnnnnnnnnnnnnnnnnnnnnnnnnnnnnnnnnnnnnnnnnnnnnnnnnnnnnnnnnnnnnnnnnnnnnnnnnnnnnnnnnnnnnnnnnnnnnnnnnnnnnnnnnnnnnnnnnnnnnnnnnnnnnnnnnnnnnnnnnnnnnnnnnnnnnnnnnnnnnnnnnnnnnnnnnnnnnnnnnnnnnnnnnnnnnnnnnnnnnnnnnnnnnnnnnnnnnnnnnnnnnnnnnnnnnnnnnnnnnnnnnnnnnnnnnnnnnnnnnnnnnnnnnnnnnnnnnnnnnnnnnnnnnnnnnnnnnnnnnnnnnnnnnnnnnnnnnnnnnnnnnnnnnnnnnnnnnnnnnnnnnnnnnnnnnnnnnnnnnnnnnnnnnnnnnnnnnnnnnnnnnnnnnnnnnnnnnnnnnnnnnnnnnnnnnnnnnnnnnnnnnnnnnnnnnnnnnnnnnnnnnnnnnnnnnnnnnnnnnnnnnnnnnnnnnnnnnnnnnnnnnnnnnnnnnnnnnnnnnnnnnnnnnnnnnnnnnnnnnnnnnnnnnnnnnnnnnnnnnnnnnnnnnnnnnnnnnnnnnnnnnnnnnnnnnnnnnnnnnnnnnnnnnnnnnnnnnnnnnnnnnnnnnnnnnnnnnnnnnnnnnnnnnnnnnnnnnnnnnnnnnnnnnnnnnnnnnnnnnnnnnnnnnnnnnnnnnnnnnnnnnnnnnnnnnnnnnnnnnnnnnnnnnnnnnnnnnnnnnnnnnnnnnnnnnnnnnnnnnnnnnnnnnnnnnnnnnnnnnnnnnnnnnnnnnnnnnnnnnnnnnnnnnnnnnnnnnnnnnnnnnnnnnnnnnnnnnnnnnnnnnnnnnnnnnnnnnnnnnnnnnnnnnnnnnnnnnnnnnnnnnnnnnnnnnnnnnnnnnnnnnnnnnnnnnnnnnnnnnnnnnnnnnnnnnnnnnnnnnnnnnnnnnnnnnnnnnnnnnnnnnnnnnnnnnnnnnnnnnnnnnnnnnnnnnnnnnnnnnnnnnnnnnnnnnnnnnnnnnnnnnnnnnnnnnnnnnnnnnnnnnnnnnnnnnnnnnnnnnnnnnnnnnnnnnnnnnnnnnnnnnnnnnnnnnnnnnnnnnnnnnnnnnnnnnnnnnnnnnnnnnnnnnnnnnnnnnnnnnnnnnnnnnnnnnnnnnnnnnnnnnnnnnnnnnnnnnnnnnnnnnnnnnnnnnnnnnnnnnnnnnnnnnnnnnnnnnnnnnnnnnnnnnnnnnnnnnnnnnnnnnnnnnnnnnnnnnnnnnnnnnnnnnnnnnnnnnnnnnnnnnnnnnnnnnnnnnnnnnnnnnnnnnnnnnnnnnnnnnnnnnnnnnnnnnnnnnnnnnnnnnnnnnnnnnnnnnnnnnnnnnnnnnnnnnnnnnnnnnnnnnnnnnnnnnnnnnnnnnnnnnnnnnnnnnnnnnnnnnnnnnnnnnnnnnnnnnnnnnnnnnnnnnnnnnnnnnnnnnnnnnnnnnnnnnnnnnnnnnnnnnnnnnnnnnnnnnnnnnnnnnnnnnnnnnnnnnnnnnnnnnnnnnnnnnnnnnnnnnnnnnnnnnnnnnnnnnnnnnnnnnnnnnnnnnnnnnnnnnnnnnnnnnnnnnnnnnnnnnnnnnnnnnnnnnnnnnnnnnnnnnnnnnnnnnnnnnnnnnnnnnnnnnnnnnnnnnnnnnnnnnnnnnnnnnnnnnnnnnnnnnnnnnnnnnnnnnnnnnnnnnnnnnnnnnnnnnnnnnnnnnnnnnnnnnnnnnnnnnnnnnnnnnnnnnnnnnnnnnnnnnnnnnnnnnnnnnnnnnnnnnnnnnnnnnnnnnnnnnnnnnnnnnnnnnnnnnnnnnnnnnnnnnnnnnnnnnnnnnnnnnnnnnnnnnnnnnnnnnnnnnnnnnnnnnnnnnnnnnnnnnnnnnnnnnnnnnnnnnnnnnnnnnnnnnnnnnnnnnnnnnnnnnnnnnnnnnnnnnnnnnnnnnnnnnnnnnnnnnnnnnnnnnnnnnnnnnnnnnnnnnnnnnnnnnnnnnnnnnnnnnnnnnnnnnnnnnnnnnnnnnnnnnnnnnnnnnnnnnnnnnnnnnnnnnnnnnnnnnnnnnnnnnnnnnnnnnnnnnnnnnnnnnnnnnnnnnnnnnnnnnnnnnnnnnnnnnnnnnnnnnnnnnnnnnnnnnnnnnnnnnnnnnnnnnnnnnnnnnnnnnnnnnnnnnnnnnnnnnnnnnnnnnnnnnnnnnnnnnnnnnnnnnnnnnnnnnnnnnnnnnnnnnnnnnnnnnnnnnnnnnnnnnnnnnnnnnnnnnnnnnnnnnnnnnnnnnnnnnnnnnnnnnnnnnnnnnnnnnnnnnnnnnnnnnnnnnnnnnnnnnnnnnnnnnnnnnnnnnnnnnnnnnnnnnnnnnnnnnnnnnnnnnnnnnnnnnnnnnnnnnnnnnnnnnnnnnnnnnnnnnnnnnnnnnnnnnnnnnnnnnnnnnnnnnnnnnnnnnnnnnnnnnnnnnnnnnnnnnnnnnnnnnnnnnnnnnnnnnnnnnnnnnnnnnnnnnnnnnnnnnnnnnnnnnnnnnnnnnnnnnnnnnnnnnnnnnnnnnnnnnnnnnnnnnnnnnnnnnnnnnnnnnnnnnnnnnnnnnnnnnnnnnnnnnnnnnnnnnnnnnnnnnnnnnnnnnnnnnnnnnnnnnnnnnnnnnnnnnnnnnnnnnnnnnnnnnnnnnnnnnnnnnnnnnnnnnnnnnnnnnnnnnnnnnnnnnnnnnnnnnnnnnnnnnnnnnnnnnnnnnnnnnnnnnnnnnnnnnnnnnnnnnnnnnnnnnnnnnnnnnnnnnnnnnnnnnnnnnnnnnnnnnnnnnnnnnnnnnnnnnnnnnnnnnnnnnnnnnnnnnnnnnnnnnnnnnnnnnnnnnnnnnnnnnnnnnnnnnnnnnnnnnnnnnnnnnnnnnnnnnnnnnnnnnnnnnnnnnnnnnnnnnnnnnnnnnnnnnnnnnnnnnnnnnnnnnnnnnnnnnnnnnnnnnnnnnnnnnnnnnnnnnnnnnnnnnnnnnnnnnnnnnnnnnnnnnnnnnnnnnnnnnnnnnnnnnnnnnnnnnnnnnnnnnnnnnnnnnnnnnnnnnnnnnnnnnnnnnnnnnnnnnnnnnnnnnnnnnnnnnnnnnnnnnnnnnnnnnnnnnnnnnnnnnnnnnnnnnnnnnnnnnnnnnnnnnnnnnnnnnnnnnnnnnnnnnnnnnnnnnnnnnnnnnnnnnnnnnnnnnnnnnnnnnnnnnnnnnnnnnnnnnnnnnnnnnnnnnnnnnnnnnnnnnnnnnnnnnnnnnnnnnnnnnnnnnnnnnnnnnnnnnnnnnnnnnnnnnnnnnnnnnnnnnnnnnnnnnnnnnnnnnnnnnnnnnnnnnnnnnnnnnnnnnnnnnnnnnnnnnnnnnnnnnnnnnnnnnnnnnnnnnnnnnnnnnnnnnnnnnnnnnnnnnnnnnnnnnnnnnnnnnnnnnnnnnnnnnnnnnnnnnnnnnnnnnnnnnnnnnnnnnnnnnnnnnnnnnnnnnnnnnnnnnnnnnnnnnnnnnnnnnnnnnnnnnnnnnnnnnnnnnnnnnnnnnnnnnnnnnnnnnnnnnnnnnnnnnnnnnnnnnnnnnnnnnnnnnnnnnnnnnnnnnnnnnnnnnnnnnnnnnnnnnnnnnnnnnnnnnnnnnnnnnnnnnnnnnnnnnnnnnnnnnnnnnnnnnnnnnnnnnnnnnnnnnnnnnnnnnnnnnnnnnnnnnnnnnnnnnnnnnnnnnnnnnnnnnnnnnnnnnnnnnnnnnnnnnnnnnnnnnnnnnnnnnnnnnnnnnnnnnnnnnnnnnnnnnnnnnnnnnnnnnnnnnnnnnnnnnnnnnnnnnnnnnnnnnnnnnnnnnnnnnnnnnnnnnnnnnnnnnnnnnnnnnnnnnnnnnnnnnnnnnnnnnnnnnnnnnnnnnnnnnnnnnnnnnnnnnnnnnnnnnnnnnnnnnnnnnnnnnnnnnnnnnnnnnnnnnnnnnnnnnnnnnnnnnnnnnnnnnnnnnnnnnnnnnnnnnnnnnnnnnnnnnnnnnnnnnnnnnnnnnnnnnnnnnnnnnnnnnnnnnnnnnnnnnnnnnnnnnnnnnnnnnnnnnnnnnnnnnnnnnnnnnnnnnnnnnnnnnnnnnnnnnnnnnnnnnnnnnnnnnnnnnnnnnnnnnnnnnnnnnnnnnnnnnnnnnnnnnnnnnnnnnnnnnnnnnnnnnnnnnnnnnnnnnnnnnnnnnnnnnnnnnnnnnnnnnnnnnnnnnnnnnnnnnnnnnnnnnnnnnnnnnnnnnnnnnnnnnnnnnnnnnnnnnnnnnnnnnnnnnnnnnnnnnnnnnnnnnnnnnnnnnnnnnnnnnnnnnnnnnnnnnnnnnnnnnnnnnnnnnnnnnnnnnnnnnnnnnnnnnnnnnnnnnnnnnnnnnnnnnnnnnnnnnnnnnnnnnnnnnnnnnnnnnnnnnnnnnnnnnnnnnnnnnnnnnnnnnnnnnnnnnnnnnnnnnnnnnnnnnnnnnnnnnnnnnnnnnnnnnnnnnnnnnnnnnnnnnnnnnnnnnnnnnnnnnnnnnnnnnnnnnnnnnnnnnnnnnnnnnnnnnnnnnnnnnnnnnnnnnnnnnnnnnnnnnnnnnnnnnnnnnnnnnnnnnnnnnnnnnnnnnnnnnnnnnnnnnnnnnnnnnnnnnnnnnnnnnnnnnnnnnnnnnnnnnnnnnnnnnnnnnnnnnnnnnnnnnnnnnnnnnnnnnnnnnnnnnnnnnnnnnnnnnnnnnnnnnnnnnnnnnnnnnnnnnnnnnnnnnnnnnnnnnnnnnnnnnnnnnnnnnnnnnnnnnnnnnnnnnnnnnnnnnnnnnnnnnnnnnnnnnnnnnnnnnnnnnnnnnnnnnnnnnnnnnnnnnnnnnnnnnnnnnnnnnnnnnnnnnnnnnnnnnnnnnnnnnnnnnnnnnnnnnnnnnnnnnnnnnnnnnnnnnnnnnnnnnnnnnnnnnnnnnnnnnnnnnnnnnnnnnnnnnnnnnnnnnnnnnnnnnnnnnnnnnnnnnnnnnnnnnnnnnnnnnnnnnnnnnnnnnnnnnnnnnnnnnnnnnnnnnnnnnnnnnnnnnnnnnnnnnnnnnnnnnnnnnnnnnnnnnnnnnnnnnnnnnnnnnnnnnnnnnnnnnnnnnnnnnnnnnnnnnnnnnnnnnnnnnnnnnnnnnnnnnnnnnnnnnnnnnnnnnnnnnnnnnnnnnnnnnnnnnnnnnnnnnnnnnnnnnnnnnnnnnnnnnnnnnnnnnnnnnnnnnnnnnnnnnnnnnnnnnnnnnnnnnnnnnnnnnnnnnnnnnnnnnnnnnnnnnnnnnnnnnnnnnnnnnnnnnnnnnnnnnnnnnnnnnnnnnnnnnnnnnnnnnnnnnnnnnnnnnnnnnnnnnnnnnnnnnnnnnnnnnnnnnnnnnnnnnnnnnnnnnnnnnnnnnnnnnnnnnnnnnnnnnnnnnnnnnnnnnnnnnnnnnnnnnnnnnnnnnnnnnnnnnnnnnnnnnnnnnnnnnnnnnnnnnnnnnnnnnnnnnnnnnnnnnnnnnnnnnnnnnnnnnnnnnnnnnnnnnnnnnnnnnnnnnnnnnnnnnnnnnnnnnnnnnnnnnnnnnnnnnnnnnnnnnnnnnnnnnnnnnnnnnnnnnnnnnnnnnnnnnnnnnnnnnnnnnnnnnnnnnnnnnnnnnnnnnnnnnnnnnnnnnnnnnnnnnnnnnnnnnnnnnnnnnnnnnnnnnnnnnnnnnnnnnnnnnnnnnnnnnnnnnnnnnnnnnnnnnnnnnnnnnnnnnnnnnnnnnnnnnnnnnnnnnnnnnnnnnnnnnnnnnnnnnnnnnnnnnnnnnnnnnnnnnnnnnnnnnnnnnnnnnnnnnnnnnnnnnnnnnnnnnnnnnnnnnnnnnnnnnnnnnnnnnnnnnnnnnnnnnnnnnnnnnnnnnnnnnnnnnnnnnnnnnnnnnnnnnnnnnnnnnnnnnnnnnnnnnnnnnnnnnnnnnnnnnnnnnnnnnnnnnnnnnnnnnnnnnnnnnnnnnnnnnnnnnnnnnnnnnnnnnnnnnnnnnnnnnnnnnnnnnnnnnnnnnnnnnnnnnnnnnnnnnnnnnnnnnnnnnnnnnnnnnnnnnnnnnnnnnnnnnnnnnnnnnnnnnnnnnnnnnnnnnnnnnnnnnnnnnnnnnnnnnnnnnnnnnnnnnnnnnnnnnnnnnnnnnnnnnnnnnnnnnnnnnnnnnnnnnnnnnnnnnnnnnnnnnnnnnnnnnnnnnnnnnnnnnnnnnnnnnnnnnnnnnnnnnnnnnnnnnnnnnnnnnnnnnnnnnnnnnnnnnnnnnnnnnnnnnnnnnnnnnnnnnnnnnnnnnnnnnnnnnnnnnnnnnnnnnnnnnnnnnnnnnnnnnnnnnnnnnnnnnnnnnnnnnnnnnnnnnnnnnnnnnnnnnnnnnnnnnnnnnnnnnnnnnnnnnnnnnnnnnnnnnnnnnnnnnnnnnnnnnnnnnnnnnnnnnnnnnnnnnnnnnnnnnnnnnnnnnnnnnnnnnnnnnnnnnnnnnnnnnnnnnnnnnnnnnnnnnnnnnnnnnnnnnnnnnnnnnnnnnnnnnnnnnnnnnnnnnnnnnnnnnnnnnnnnnnnnnnnnnnnnnnnnnnnnnnnnnnnnnnnnnnnnnnnnnnnnnnnnnnnnnnnnnnnnnnnnnnnnnnnnnnnnnnnnnnnnnnnnnnnnnnnnnnnnnnnnnnnnnnnnnnnnnnnnnnnnnnnnnnnnnnnnnnnnnnnnnnnnnnnnnnnnnnnnnnnnnnnnnnnnnnnnnnnnnnnnnnnnnnnnnnnnnnnnnnnnnnnnnnnnnnnnnnnnnnnnnnnnnnnnnnnnnnnnnnnnnnnnnnnnnnnnnnnnnnnnnnnnnnnnnnnnnnnnnnnnnnnnnnnnnnnnnnnnnnnnnnnnnnnnnnnnnnnnnnnnnnnnnnnnnnnnnnnnnnnnnnnnnnnnnnnnnnnnnnnnnnnnnnnnnnnnnnnnnnnnnnnnnnnnnnnnnnnnnnnnnnnnnnnnnnnnnnnnnnnnnnnnnnnnnnnnnnnnnnnnnnnnnnnnnnnnnnnnnnnnnnnnnnnnnnnnnnnnnnnnnnnnnnnnnnnnnnnnnnnnnnnnnnnnnnnnnnnnnnnnnnnnnnnnnnnnnnnnnnnnnnnnnnnnnnnnnnnnnnnnnnnnnnnnnnnnnnnnnnnnnnnnnnnnnnnnnnnnnnnnnnnnnnnnnnnnnnnnnnnnnnnnnnnnnnnnnnnnnnnnnnnnnnnnnnnnnnnnnnnnnnnnnnnnnnnnnnnnnnnnnnnnnnnnnnnnnnnnnnnnnnnnnnnnnnnnnnnnnnnnnnnnnnnnnnnnnnnnnnnnnnnnnnnnnnnnnnnnnnnnnnnnnnnnnnnnnnnnnnnnnnnnnnnnnnnnnnnnnnnnnnnnnnnnnnnnnnnnnnnnnnnnnnnnnnnnnnnnnnnnnnnnnnnnnnnnnnnnnnnnnnnnnnnnnnnnnnnnnnnnnnnnnnnnnnnnnnnnnnnnnnnnnnnnnnnnnnnnnnnnnnnnnnnnnnnnnnnnnnnnnnnnnnnnnnnnnnnnnnnnnnnnnnnnnnnnnnnnnnnnnnnnnnnnnnnnnnnnnnnnnnnnnnnnnnnnnnnnnnnnnnnnnnnnnnnnnnnnnnnnnnnnnnnnnnnnnnnnnnnnnnnnnnnnnnnnnnnnnnnnnnnnnnnnnnnnnnnnnnnnnnnnnnnnnnnnnnnnnnnnnnnnnnnnnnnnnnnnnnnnnnnnnnnnnnnnnnnnnnnnnnnnnnnnnnnnnnnnnnnnnnnnnnnnnnnnnnnnnnnnnnnnnnnnnnnnnnnnnnnnnnnnnnnnnnnnnnnnnnnnnnnnnnnnnnnnnnnnnnnnnnnnnnnnnnnnnnnnnnnnnnnnnnnnnnnnnnnnnnnnnnnnnnnnnnnnnnnnnnnnnnnnnnnnnnnnnnnnnnnnnnnnnnnnnnnnnnnnnnnnnnnnnnnnnnnnnnnnnnnnnnnnnnnnnnnnnnnnnnnnnnnnnnnnnnnnnnnnnnnnnnnnnnnnnnnnnnnnnnnnnnnnnnnnnnnnnnnnnnnnnnnnnnnnnnnnnnnnnnnnnnnnnnnnnnnnnnnnnnnnnnnnnnnnnnnnnnnnnnnnnnnnnnnnnnnnnnnnnnnnnnnnnnnnnnnnnnnnnnnnnnnnnnnnnnnnnnnnnnnnnnnnnnnnnnnnnnnnnnnnnnnnnnnnnnnnnnnnnnnnnnnnnnnnnnnnnnnnnnnnnnnnnnnnnnnnnnnnnnnnnnnnnnnnnnnnnnnnnnnnnnnnnnnnnnnnnnnnnnnnnnnnnnnnnnnnnnnnnnnnnnnnnnnnnnnnnnnnnnnnnnnnnnnnnnnnnnnnnnnnnnnnnnnnnnnnnnnnnnnnnnnnnnnnnnnnnnnnnnnnnnnnnnnnnnnnnnnnnnnnnnnnnnnnnnnnnnnnnnnnnnnnnnnnnnnnnnnnnnnnnnnnnnnnnnnnnnnnnnnnnnnnnnnnnnnnnnnnnnnnnnnnnnnnnnnnnnnnnnnnnnnnnnnnnnnnnnnnnnnnnnnnnnnnnnnnnnnnnnnnnnnnnnnnnnnnnnnnnnnnnnnnnnnnnnnnnnnnnnnnnnnnnnnnnnnnnnnnnnnnnnnnnnnnnnnnnnnnnnnnnnnnnnnnnnnnnnnnnnnnnnnnnnnnnnnnnnnnnnnnnnnnnnnnnnnnnnnnnnnnnnnnnnnnnnnnnnnnnnnnnnnnnnnnnnnnnnnnnnnnnnnnnnnnnnnnnnnnnnnnnnnnnnnnnnnnnnnnnnnnnnnnnnnnnnnnnnnnnnnnnnnnnnnnnnnnnnnnnnnnnnnnnnnnnnnnnnnnnnnnnnnnnnnnnnnnnnnnnnnnnnnnnnnnnnnnnnnnnnnnnnnnnnnnnnnnnnnnnnnnnnnnnnnnnnnnnnnnnnnnnnnnnnnnnnnnnnnnnnnnnnnnnnnnnnnnnnnnnnnnnnnnnnnnnnnnnnnnnnnnnnnnnnnnnnnnnnnnnnnnnnnnnnnnnnnnnnnnnnnnnnnnnnnnnnnnnnnnnnnnnnnnnnnnnnnnnnnnnnnnnnnnnnnnnnnnnnnnnnnnnnnnnnnnnnnnnnnnnnnnnnnnnnnnnnnnnnnnnnnnnnnnnnnnnnnnnnnnnnnnnnnnnnnnnnnnnnnnnnnnnnnnnnnnnnnnnnnnnnnnnnnnnnnnnnnnnnnnnnnnnnnnnnnnnnnnnnnnnnnnnnnnnnnnnnnnnnnnnnnnnnnnnnnnnnnnnnnnnnnnnnnnnnnnnnnnnnnnnnnnnnnnnnnnnnnnnnnnnnnnnnnnnnnnnnnnnnnnnnnnnnnnnnnnnnnnnnnnnnnnnnnnnnnnnnnnnnnnnnnnnnnnnnnnnnnnnnnnnnnnnnnnnnnnnnnnnnnnnnnnnnnnnnnnnnnnnnnnnnnnnnnnnnnnnnnnnnnnnnnnnnnnnnnnnnnnnnnnnnnnnnnnnnnnnnnnnnnnnnnnnnnnnnnnnnnnnnnnnnnnnnnnnnnnnnnnnnnnnnnnnnnnnnnnnnnnnnnnnnnnnnnnnnnnnnnnnnnnnnnnnnnnnnnnnnnnnnnnnnnnnnnnnnnnnnnnnnnnnnnnnnnnnnnnnnnnnnnnnnnnnnnnnnnnnnnnnnnnnnnnnnnnnnnnnnnnnnnnnnnnnnnnnnnnnnnnnnnnnnnnnnnnnnnnnnnnnnnnnnnnnnnnnnnnnnnnnnnnnnnnnnnnnnnnnnnnnnnnnnnnnnnnnnnnnnnnnnnnnnnnnnnnnnnnnnnnnnnnnnnnnnnnnnnnnnnnnnnnnnnnnnnnnnnnnnnnnnnnnnnnnnnnnnnnnnnnnnnnnnnnnnnnnnnnnnnnnnnnnnnnnnnnnnnnnnnnnnnnnnnnnnnnnnnnnnnnnnnnnnnnnnnnnnnnnnnnnnnnnnnnnnnnnnnnnnnnnnnnnnnnnnnnnnnnnnnnnnnnnnnnnnnnnnnnnnnnnnnnnnnnnnnnnnnnnnnnnnnnnnnnnnnnnnnnnnnnnnnnnnnnnnnnnnnnnnnnnnnnnnnnnnnnnnnnnnnnnnnnnnnnnnnnnnnnnnnnnnnnnnnnnnnnnnnnnnnnnnnnnnnnnnnnnnnnnnnnnnnnnnnnnnnnnnnnnnnnnnnnnnnnnnnnnnnnnnnnnnnnnnnnnnnnnnnnnnnnnnnnnnnnnnnnnnnnnnnnnnnnnnnnnnnnnnnnnnnnnnnnnnnnnnnnnnnnnnnnnnnnnnnnnnnnnnnnnnnnnnnnnnnnnnnnnnnnnnnnnnnnnnnnnnnnnnnnnnnnnnnnnnnnnnnnnnnnnnnnnnnnnnnnnnnnnnnnnnnnnnnnnnnnnnnnnnnnnnnnnnnnnnnnnnnnnnnnnnnnnnnnnnnnnnnnnnnnnnnnnnnnnnnnnnnnnnnnnnnnnnnnnnnnnnnnnnnnnnnnnnnnnnnnnnnnnnnnnnnnnnnnnnnnnnnnnnnnnnnnnnnnnnnnnnnnnnnnnnnnnnnnnnnnnnnnnnnnnnnnnnnnnnnnnnnnnnnnnnnnnnnnnnnnnnnnnnnnnnnnnnnnnnnnnnnnnnnnnnnnnnnnnnnnnnnnnnnnnnnnnnnnnnnnnnnnnnnnnnnnnnnnnnnnnnnnnnnnnnnnnnnnnnnnnnnnnnnnnnnnnnnnnnnnnnnnnnnnnnnnnnnnnnnnnnnnnnnnnnnnnnnnnnnnnnnnnnnnnnnnnnnnnnnnnnnnnnnnnnnnnnnnnnnnnnnnnnnnnnnnnnnnnnnnnnnnnnnnnnnnnnnnnnnnnnnnnnnnnnnnnnnnnnnnnnnnnnnnnnnnnnnnnnnnnnnnnnnnnnnnnnnnnnnnnnnnnnnnnnnnnnnnnnnnnnnnnnnnnnnnnnnnnnnnnnnnnnnnnnnnnnnnnnnnnnnnnnnnnnnnnnnnnnnnnnnnnnnnnnnnnnnnnnnnnnnnnnnnnnnnnnnnnnnnnnnnnnnnnnnnnnnnnnnnnnnnnnnnnnnnnnnnnnnnnnnnnnnnnnnnnnnnnnnnnnnnnnnnnnnnnnnnnnnnnnnnnnnnnnnnnnnnnnnnnnnnnnnnnnnnnnnnnnnnnnnnnnnnnnnnnnnnnnnnnnnnnnnnnnnnnnnnnnnnnnnnnnnnnnnnnnnnnnnnnnnnnnnnnnnnnnnnnnnnnnnnnnnnnnnnnnnnnnnnnnnnnnnnnnnnnnnnnnnnnnnnnnnnnnnnnnnnnnnnnnnnnnnnnnnnnnnnnnnnnnnnnnnnnnnnnnnnnnnnnnnnnnnnnnnnnnnnnnnnnnnnnnnnnnnnnnnnnnnnnnnnnnnnnnnnnnnnnnnnnnnnnnnnnnnnnnnnnnnnnnnnnnnnnnnnnnnnnnnnnnnnnnnnnnnnnnnnnnnnnnnnnnnnnnnnnnnnnnnnnnnnnnnnnnnnnnnnnnnnnnnnnnnnnnnnnnnnnnnnnnnnnnnnnnnnnnnnnnnnnnnnnnnnnnnnnnnnnnnnnnnnnnnnnnnnnnnnnnnnnnnnnnnnnnnnnnnnnnnnnnnnnnnnnnnnnnnnnnnnnnnnnnnnnnnnnnnnnnnnnnnnnnnnnnnnnnnnnnnnnnnnnnnnnnnnnnnnnnnnnnnnnnnnnnnnnnnnnnnnnnnnnnnnnnnnnnnnnnnnnnnnnnnnnnnnnnnnnnnnnnnnnnnnnnnnnnnnnnnnnnnnnnnnnnnnnnnnnnnnnnnnnnnnnnnnnnnnnnnnnnnnnnnnnnnnnnnnnnnnnnnnnnnnnnnnnnnnnnnnnnnnnnnnnnnnnnnnnnnnnnnnnnnnnnnnnnnnnnnnnnnnnnnnnnnnnnnnnnnnnnnnnnnnnnnnnnnnnnnnnnnnnnnnnnnnnnnnnnnnnnnnnnnnnnnnnnnnnnnnnnnnnnnnnnnnnnnnnnnnnnnnnnnnnnnnnnnnnnnnnnnnnnnnnnnnnnnnnnnnnnnnnnnnnnnnnnnnnnnnnnnnnnnnnnnnnnnnnnnnnnnnnnnnnnnnnnnnnnnnnnnnnnnnnnnnnnnnnnnnnnnnnnnnnnnnnnnnnnnnnnnnnnnnnnnnnnnnnnnnnnnnnnnnnnnnnnnnnnnnnnnnnnnnnnnnnnnnnnnnnnnnnnnnnnnnnnnnnnnnnnnnnnnnnnnnnnnnnnnnnnnnnnnnnnnnnnnnnnnnnnnnnnnnnnnnnnnnnnnnnnnnnnnnnnnnnnnnnnnnnnnnnnnnnnnnnnnnnnnnnnnnnnnnnnnnnnnnnnnnnnnnnnnnnnnnnnnnnnnnnnnnnnnnnnnnnnnnnnnnnnnnnnnnnnnnnnnnnnnnnnnnnnnnnnnnnnnnnnnnnnnnnnnnnnnnnnnnnnnnnnnnnnnnnnnnnnnnnnnnnnnnnnnnnnnnnnnnnnnnnnnnnnnnnnnnnnnnnnnnnnnnnnnnnnnnnnnnnnnnnnnnnnnnnnnnnnnnnnnnnnnnnnnnnnnnnnnnnnnnnnnnnnnnnnnnnnnnnnnnnnnnnnnnnnnnnnnnnnnnnnnnnnnnnnnnnnnnnnnnnnnnnnnnnnnnnnnnnnnnnnnnnnnnnnnnnnnnnnnnnnnnnnnnnnnnnnnnnnnnnnnnnnnnnnnnnnnnnnnnnnnnnnnnnnnnnnnnnnnnnnnnnnnnnnnnnnnnnnnnnnnnnnnnnnnnnnnnnnnnnnnnnnnnnnnnnnnnnnnnnnnnnnnnnnnnnnnnnnnnnnnnnnnnnnnnnnnnnnnnnnnnnnnnnnnnnnnnnnnnnnnnnnnnnnnnnnnnnnnnnnnnnnnnnnnnnnnnnnnnnnnnnnnnnnnnnnnnnnnnnnnnnnnnnnnnnnnnnnnnnnnnnnnnnnnnnnnnnnnnnnnnnnnnnnnnnnnnnnnnnnnnnnnnnnnnnnnnnnnnnnnnnnnnnnnnnnnnnnnnnnnnnnnnnnnnnnnnnnnnnnnnnnnnnnnnnnnnnnnnnnnnnnnnnnnnnnnnnnnnnnnnnnnnnnnnnnnnnnnnnnnnnnnnnnnnnnnnnnnnnnnnnnnnnnnnnnnnnnnnnnnnnnnnnnnnnnnnnnnnnnnnnnnnnnnnnnnnnnnnnnnnnnnnnnnnnnnnnnnnnnnnnnnnnnnnnnnnnnnnnnnnnnnnnnnnnnnnnnnnnnnnnnnnnnnnnnnnnnnnnnnnnnnnnnnnnnnnnnnnnnnnnnnnnnnnnnnnnnnnnnnnnnnnnnnnnnnnnnnnnnnnnnnnnnnnnnnnnnnnnnnnnnnnnnnnnnnnnnnnnnnnnnnnnnnnnnnnnnnnnnnnnnnnnnnnnnnnnnnnnnnnnnnnnnnnnnnnnnnnnnnnnnnnnnnnnnnnnnnnnnnnnnnnnnnnnnnnnnnnnnnnnnnnnnnnnnnnnnnnnnnnnnnnnnnnnnnnnnnnnnnnnnnnnnnnnnnnnnnnnnnnnnnnnnnnnnnnnnnnnnnnnnnnnnnnnnnnnnnnnnnnnnnnnnnnnnnnnnnnnnnnnnnnnnnnnnnnnnnnnnnnnnnnnnnnnnnnnnnnnnnnnnnnnnnnnnnnnnnnnnnnnnnnnnnnnnnnnnnnnnnnnnnnnnnnnnnnnnnnnnnnnnnnnnnnnnnnnnnnnnnnnnnnnnnnnnnnnnnnnnnnnnnnnnnnnnnnnnnnnnnnnnnnnnnnnnnnnnnnnnnnnnnnnnnnnnnnnnnnnnnnnnnnnnnnnnnnnnnnnnnnnnnnnnnnnnnnnnnnnnnnnnnnnnnnnnnnnnnnnnnnnnnnnnnnnnnnnnnnnnnnnnnnnnnnnnnnnnnnnnnnnnnnnnnnnnnnnnnnnnnnnnnnnnnnnnnnnnnnnnnnnnnnnnnnnnnnnnnnnnnnnnnnnnnnnnnnnnnnnnnnnnnnnnnnnnnnnnnnnnnnnnnnnnnnnnnnnnnnnnnnnnnnnnnnnnnnnnnnnnnnnnnnnnnnnnnnnnnnnnnnnnnnnnnnnnnnnnnnnnnnnnnnnnnnnnnnnnnnnnnnnnnnnnnnnnnnnnnnnnnnnnnnnnnnnnnnnnnnnnnnnnnnnnnnnnnnnnnnnnnnnnnnnnnnnnnnnnnnnnnnnnnnnnnnnnnnnnnnnnnnnnnnnnnnnnnnnnnnnnnnnnnnnnnnnnnnnnnnnnnnnnnnnnnnnnnnnnnnnnnnnnnnnnnnnnnnnnnnnnnnnnnnnnnnnnnnnnnnnnnnnnnnnnnnnnnnnnnnnnnnnnnnnnnnnnnnnnnnnnnnnnnnnnnnnnnnnnnnnnnnnnnnnnnnnnnnnnnnnnnnnnnnnnnnnnnnnnnnnnnnnnnnnnnnnnnnnnnnnnnnnnnnnnnnnnnnnnnnnnnnnnnnnnnnnnnnnnnnnnnnnnnnnnnnnnnnnnnnnnnnnnnnnnnnnnnnnnnnnnnnnnnnnnnnnnnnnnnnnnnnnnnnnnnnnnnnnnnnnnnnnnnnnnnnnnnnnnnnnnnnnnnnnnnnnnnnnnnnnnnnnnnnnnnnnnnnnnnnnnnnnnnnnnnnnnnnnnnnnnnnnnnnnnnnnnnnnnnnnnnnnnnnnnnnnnnnnnnnnnnnnnnnnnnnnnnnnnnnnnnnnnnnnnnnnnnnnnnnnnnnnnnnnnnnnnnnnnnnnnnnnnnnnnnnnnnnnnnnnnnnnnnnnnnnnnnnnnnnnnnnnnnnnnnnnnnnnnnnnnnnnnnnnnnnnnnnnnnnnnnnnnnnnnnnnnnnnnnnnnnnnnnnnnnnnnnnnnnnnnnnnnnnnnnnnnnnnnnnnnnnnnnnnnnnnnnnnnnnnnnnnnnnnnnnnnnnnnnnnnnnnnnnnnnnnnnnnnnnnnnnnnnnnnnnnnnnnnnnnnnnnnnnnnnnnnnnnnnnnnnnnnnnnnnnnnnnnnnnnnnnnnnnnnnnnnnnnnnnnnnnnnnnnnnnnnnnnnnnnnnnnnnnnnnnnnnnnnnnnnnnnnnnnnnnnnnnnnnnnnnnnnnnnnnnnnnnnnnnnnnnnnnnnnnnnnnnnnnnnnnnnnnnnnnnnnnnnnnnnnnnnnnnnnnnnnnnnnnnnnnnnnnnnnnnnnnnnnnnnnnnnnnnnnnnnnnnnnnnnnnnnnnnnnnnnnnnnnnnnnnnnnnnnnnnnnnnnnnnnnnnnnnnnnnnnnnnnnnnnnnnnnnnnnnnnnnnnnnnnnnnnnnnnnnnnnnnnnnnnnnnnnnnnnnnnnnnnnnnnnnnnnnnnnnnnnnnnnnnnnnnnnnnnnnnnnnnnnnnnnnnnnnnnnnnnnnnnnnnnnnnnnnnnnnnnnnnnnnnnnnnnnnnnnnnnnnnnnnnnnnnnnnnnnnnnnnnnnnnnnnnnnnnnnnnnnnnnnnnnnnnnnnnnnnnnnnnnnnnnnnnnnnnnnnnnnnnnnnnnnnnnnnnnnnnnnnnnnnnnnnnnnnnnnnnnnnnnnnnnnnnnnnnnnnnnnnnnnnnnnnnnnnnnnnnnnnnnnnnnnnnnnnnnnnnnnnnnnnnnnnnnnnnnnnnnnnnnnnnnnnnnnnnnnnnnnnnnnnnnnnnnnnnnnnnnnnnnnnnnnnnnnnnnnnnnnnnnnnnnnnnnnnnnnnnnnnnnnnnnnnnnnnnnnnnnnnnnnnnnnnnnnnnnnnnnnnnnnnnnnnnnnnnnnnnnnnnnnnnnnnnnnnnnnnnnnnnnnnnnnnnnnnnnnnnnnnnnnnnnnnnnnnnnnnnnnnnnnnnnnnnnnnnnnnnnnnnnnnnnnnnnnnnnnnnnnnnnnnnnnnnnnnnnnnnnnnnnnnnnnnnnnnnnnnnnnnnnnnnnnnnnnnnnnnnnnnnnnnnnnnnnnnnnnnnnnnnnnnnnnnnnnnnnnnnnnnnnnnnnnnnnnnnnnnnnnnnnnnnnnnnnnnnnnnnnnnnnnnnnnnnnnnnnnnnnnnnnnnnnnnnnnnnnnnnnnnnnnnnnnnnnnnnnnnnnnnnnnnnnnnnnnnnnnnnnnnnnnnnnnnnnnnnnnnnnnnnnnnnnnnnnnnnnnnnnnnnnnnnnnnnnnnnnnnnnnnnnnnnnnnnnnnnnnnnnnnnnnnnnnnnnnnnnnnnnnnnnnnnnnnnnnnnnnnnnnnnnnnnnnnnnnnnnnnnnnnnnnnnnnnnnnnnnnnnnnnnnnnnnnnnnnnnnnnnnnnnnnnnnnnnnnnnnnnnnnnnnnnnnnnnnnnnnnnnnnnnnnnnnnnnnnnnnnnnnnnnnnnnnnnnnnnnnnnnnnnnnnnnnnnnnnnnnnnnnnnnnnnnnnnnnnnnnnnnnnnnnnnnnnnnnnnnnnnnnnnnnnnnnnnnnnnnnnnnnnnnnnnnnnnnnnnnnnnnnnnnnnnnnnnnnnnnnnnnnnnnnnnnnnnnnnnnnnnnnnnnnnnnnnnnnnnnnnnnnnnnnnnnnnnnnnnnnnnnnnnnnnnnnnnnnnnnnnnnnnnnnnnnnnnnnnnnnnnnnnnnnnnnnnnnnnnnnnnnnnnnnnnnnnnnnnnnnnnnnnnnnnnnnnnnnnnnnnnnnnnnnnnnnnnnnnnnnnnnnnnnnnnnnnnnnnnnnnnnnnnnnnnnnnnnnnnnnnnnnnnnnnnnnnnnnnnnnnnnnnnnnnnnnnnnnnnnnnnnnnnnnnnnnnnnnnnnnnnnnnnnnnnnnnnnnnnnnnnnnnnnnnnnnnnnnnnnnnnnnnnnnnnnnnnnnnnnnnnnnnnnnnnnnnnnnnnnnnnnnnnnnnnnnnnnnnnnnnnnnnnnnnnnnnnnnnnnnnnnnnnnnnnnnnnnnnnnnnnnnnnnnnnnnnnnnnnnnnnnnnnnnnnnnnnnnnnnnnnnnnnnnnnnnnnnnnnnnnnnnnnnnnnnnnnnnnnnnnnnnnnnnnnnnnnnnnnnnnnnnnnnnnnnnnnnnnnnnnnnnnnnnnnnnnnnnnnnnnnnnnnnnnnnnnnnnnnnnnnnnnnnnnnnnnnnnnnnnnnnnnnnnnnnnnnnnnnnnnnnnnnnnnnnnnnnnnnnnnnnnnnnnnnnnnnnnnnnnnnnnnnnnnnnnnnnnnnnnnnnnnnnnnnnnnnnnnnnnnnnnnnnnnnnnnnnnnnnnnnnnnnnnnnnnnnnnnnnnnnnnnnnnnnnnnnnnnnnnnnnnnnnnnnnnnnnnnnnnnnnnnnnnnnnnnnnnnnnnnnnnnnnnnnnnnnnnnnnnnnnnnnnnnnnnnnnnnnnnnnnnnnnnnnnnnnnnnnnnnnnnnnnnnnnnnnnnnnnnnnnnnnnnnnnnnnnnnnnnnnnnnnnnnnnnnnnnnnnnnnnnnnnnnnnnnnnnnnnnnnnnnnnnnnnnnnnnnnnnnnnnnnnnnnnnnnnnnnnnnnnnnnnnnnnnnnnnnnnnnnnnnnnnnnnnnnnnnnnnnnnnnnnnnnnnnnnnnnnnnnnnnnnnnnnnnnnnnnnnnnnnnnnnnnnnnnnnnnnnnnnnnnnnnnnnnnnnnnnnnnnnnnnnnnnnnnnnnnnnnnnnnnnnnnnnnnnnnnnnnnnnnnnnnnnnnnnnnnnnnnnnnnnnnnnnnnnnnnnnnnnnnnnnnnnnnnnnnnnnnnnnnnnnnnnnnnnnnnnnnnnnnnnnnnnnnnnnnnnnnnnnnnnnnnnnnnnnnnnnnnnnnnnnnnnnnnnnnnnnnnnnnnnnnnnnnnnnnnnnnnnnnnnnnnnnnnnnnnnnnnnnnnnnnnnnnnnnnnnnnnnnnnnnnnnnnnnnnnnnnnnnnnnnnnnnnnnnnnnnnnnnnnnnnnnnnnnnnnnnnnnnnnnnnnnnnnnnnnnnnnnnnnnnnnnnnnnnnnnnnnnnnnnnnnnnnnnnnnnnnnnnnnnnnnnnnnnnnnnnnnnnnnnnnnnnnnnnnnnnnnnnnnnnnnnnnnnnnnnnnnnnnnnnnnnnnnnnnnnnnnnnnnnnnnnnnnnnnnnnnnnnnnnnnnnnnnnnnnnnnnnnnnnnnnnnnnnnnnnnnnnnnnnnnnnnnnnnnnnnnnnnnnnnnnnnnnnnnnnnnnnnnnnnnnnnnnnnnnnnnnnnnnnnnnnnnnnnnnnnnnnnnnnnnnnnnnnnnnnnnnnnnnnnnnnnnnnnnnnnnnnnnnnnnnnnnnnnnnnnnnnnnnnnnnnnnnnnnnnnnnnnnnnnnnnnnnnnnnnnnnnnnnnnnnnnnnnnnnnnnnnnnnnnnnnnnnnnnnnnnnnnnnnnnnnnnnnnnnnnnnnnnnnnnnnnnnnnnnnnnnnnnnnnnnnnnnnnnnnnnnnnnnnnnnnnnnnnnnnnnnnnnnnnnnnnnnnnnnnnnnnnnnnnnnnnnnnnnnnnnnnnnnnnnnnnnnnnnnnnnnnnnnnnnnnnnnnnnnnnnnnnnnnnnnnnnnnnnnnnnnnnnnnnnnnnnnnnnnnnnnnnnnnnnnnnnnnnnnnnnnnnnnnnnnnnnnnnnnnnnnnnnnnnnnnnnnnnnnnnnnnnnnnnnnnnnnnnnnnnnnnnnnnnnnnnnnnnnnnnnnnnnnnnnnnnnnnnnnnnnnnnnnnnnnnnnnnnnnnnnnnnnnnnnnnnnnnnnnnnnnnnnnnnnnnnnnnnnnnnnnnnnnnnnnnnnnnnnnnnnnnnnnnnnnnnnnnnnnnnnnnnnnnnnnnnnnnnnnnnnnnnnnnnnnnnnnnnnnnnnnnnnnnnnnnnnnnnnnnnnnnnnnnnnnnnnnnnnnnnnnnnnnnnnnnnnnnnnnnnnnnnnnnnnnnnnnnnnnnnnnnnnnnnnnnnnnnnnnnnnnnnnnnnnnnnnnnnnnnnnnnnnnnnnnnnnnnnnnnnnnnnnnnnnnnnnnnnnnnnnnnnnnnnnnnnnnnnnnnnnnnnnnnnnnnnnnnnnnnnnnnnnnnnnnnnnnnnnnnnnnnnnnnnnnnnnnnnnnnnnnnnnnnnnnnnnnnnnnnnnnnnnnnnnnnnnnnnnnnnnnnnnnnnnnnnnnnnnnnnnnnnnnnnnnnnnnnnnnnnnnnnnnnnnnnnnnnnnnnnnnnnnnnnnnnnnnnnnnnnnnnnnnnnnnnnnnnnnnnnnnnnnnnnnnnnnnnnnnnnnnnnnnnnnnnnnnnnnnnnnnnnnnnnnnnnnnnnnnnnnnnnnnnnnnnnnnnnnnnnnnnnnnnnnnnnnnnnnnnnnnnnnnnnnnnnnnnnnnnnnnnnnnnnnnnnnnnnnnnnnnnnnnnnnnnnnnnnnnnnnnnnnnnnnnnnnnnnnnnnnnnnnnnnnnnnnnnnnnnnnnnnnnnnnnnnnnnnnnnnnnnnnnnnnnnnnnnnnnnnnnnnnnnnnnnnnnnnnnnnnnnnnnnnnnnnnnnnnnnnnnnnnnnnnnnnnnnnnnnnnnnnnnnnnnnnnnnnnnnnnnnnnnnnnnnnnnnnnnnnnnnnnnnnnnnnnnnnnnnnnnnnnnnnnnnnnnnnnnnnnnnnnnnnnnnnnnnnnnnnnnnnnnnnnnnnnnnnnnnnnnnnnnnnnnnnnnnnnnnnnnnnnnnnnnnnnnnnnnnnnnnnnnnnnnnnnnnnnnnnnnnnnnnnnnnnnnnnnnnnnnnnnnnnnnnnnnnnnnnnnnnnnnnnnnnnnnnnnnnnnnnnnnnnnnnnnnnnnnnnnnnnnnnnnnnnnnnnnnnnnnnnnnnnnnnnnnnnnnnnnnnnnnnnnnnnnnnnnnnnnnnnnnnnnnnnnnnnnnnnnnnnnnnnnnnnnnnnnnnnnnnnnnnnnnnnnnnnnnnnnnnnnnnnnnnnnnnnnnnnnnnnnnnnnnnnnnnnnnnnnnnnnnnnnnnnnnnnnnnnnnnnnnnnnnnnnnnnnnnnnnnnnnnnnnnnnnnnnnnnnnnnnnnnnnnnnnnnnnnnnnnnnnnnnnnnnnnnnnnnnnnnnnnnnnnnnnnnnnnnnnnnnnnnnnnnnnnnnnnnnnnnnnnnnnnnnnnnnnnnnnnnnnnnnnnnnnnnnnnnnnnnnnnnnnnnnnnnnnnnnnnnnnnnnnnnnnnnnnnnnnnnnnnnnnnnnnnnnnnnnnnnnnnnnnnnnnnnnnnnnnnnnnnnnnnnnnnnnnnnnnnnnnnnnnnnnnnnnnnnnnnnnnnnnnnnnnnnnnnnnnnnnnnnnnnnnnnnnnnnnnnnnnnnnnnnnnnnnnnnnnnnnnnnnnnnnnnnnnnnnnnnnnnnnnnnnnnnnnnnnnnnnnnnnnnnnnnnnnnnnnnnnnnnnnnnnnnnnnnnnnnnnnnnnnnnnnnnnnnnnnnnnnnnnnnnnnnnnnnnnnnnnnnnnnnnnnnnnnnnnnnnnnnnnnnnnnnnnnnnnnnnnnnnnnnnnnnnnnnnnnnnnnnnnnnnnnnnnnnnnnnnnnnnnnnnnnnnnnnnnnnnnnnnnnnnnnnnnnnnnnnnnnnnnnnnnnnnnnnnnnnnnnnnnnnnnnnnnnnnnnnnnnnnnnnnnnnnnnnnnnnnnnnnnnnnnnnnnnnnnnnnnnnnnnnnnnnnnnnnnnnnnnnnnnnnnnnnnnnnnnnnnnnnnnnnnnnnnnnnnnnnnnnnnnnnnnnnnnnnnnnnnnnnnnnnnnnnnnnnnnnnnnnnnnnnnnnnnnnnnnnnnnnnnnnnnnnnnnnnnnnnnnnnnnnnnnnnnnnnnnnnnnnnnnnnnnnnnnnnnnnnnnnnnnnnnnnnnnnnnnnnnnnnnnnnnnnnnnnnnnnnnnnnnnnnnnnnnnnnnnnnnnnnnnnnnnnnnnnnnnnnnnnnnnnnnnnnnnnnnnnnnnnnnnnnnnnnnnnnnnnnnnnnnnnnnnnnnnnnnnnnnnnnnnnnnnnnnnnnnnnnnnnnnnnnnnnnnnnnnnnnnnnnnnnnnnnnnnnnnnnnnnnnnnnnnnnnnnnnnnnnnnnnnnnnnnnnnnnnnnnnnnnnnnnnnnnnnnnnnnnnnnnnnnnnnnnnnnnnnnnnnnnnnnnnnnnnnnnnnnnnnnnnnnnnnnnnnnnnnnnnnnnnnnnnnnnnnnnnnnnnnnnnnnnnnnnnnnnnnnnnnnnnnnnnnnnnnnnnnnnnnnnnnnnnnnnnnnnnnnnnnnnnnnnnnnnnnnnnnnnnnnnnnnnnnnnnnnnnnnnnnnnnnnnnnnnnnnnnnnnnnnnnnnnnnnnnnnnnnnnnnnnnnnnnnnnnnnnnnnnnnnnnnnnnnnnnnnnnnnnnnnnnnnnnnnnnnnnnnnnnnnnnnnnnnnnnnnnnnnnnnnnnnnnnnnnnnnnnnnnnnnnnnnnnnnnnnnnnnnnnnnnnnnnnnnnnnnnnnnnnnnnnnnnnnnnnnnnnnnnnnnnnnnnnnnnnnnnnnnnnnnnnnnnnnnnnnnnnnnnnnnnnnnnnnnnnnnnnnnnnnnnnnnnnnnnnnnnnnnnnnnnnnnnnnnnnnnnnnnnnnnnnnnnnnnnnnnnnnnnnnnnnnnnnnnnnnnnnnnnnnnnnnnnnnnnnnnnnnnnnnnnnnnnnnnnnnnnnnnnnnnnnnnnnnnnnnnnnnnnnnnnnnnnnnnnnnnnnnnnnnnnnnnnnnnnnnnnnnnnnnnnnnnnnnnnnnnnnnnnnnnnnnnnnnnnnnnnnnnnnnnnnnnnnnnnnnnnnnnnnnnnnnnnnnnnnnnnnnnnnnnnnnnnnnnnnnnnnnnnnnnnnnnnnnnnnnnnnnnnnnnnnnnnnnnnnnnnnnnnnnnnnnnnnnnnnnnnnnnnnnnnnnnnnnnnnnnnnnnnnnnnnnnnnnnnnnnnnnnnnnnnnnnnnnnnnnnnnnnnnnnnnnnnnnnnnnnnnnnnnnnnnnnnnnnnnnnnnnnnnnnnnnnnnnnnnnnnnnnnnnnnnnnnnnnnnnnnnnnnnnnnnnnnnnnnnnnnnnnnnnnnnnnnnnnnnnnnnnnnnnnnnnnnnnnnnnnnnnnnnnnnnnnnnnnnnnnnnnnnnnnnnnnnnnnnnnnnnnnnnnnnnnnnnnnnnnnnnnnnnnnnnnnnnnnnnnnnnnnnnnnnnnnnnnnnnnnnnnnnnnnnnnnnnnnnnnnnnnnnnnnnnnnnnnnnnnnnnnnnnnnnnnnnnnnnnnnnnnnnnnnnnnnnnnnnnnnnnnnnnnnnnnnnnnnnnnnnnnnnnnnnnnnnnnnnnnnnnnnnnnnnnnnnnnnnnnnnnnnnnnnnnnnnnnnnnnnnnnnnnnnnnnnnnnnnnnnnnnnnnnnnnnnnnnnnnnnnnnnnnnnnnnnnnnnnnnnnnnnnnnnnnnnnnnnnnnnnnnnnnnnnnnnnnnnnnnnnnnnnnnnnnnnnnnnnnnnnnnnnnnnnnnnnnnnnnnnnnnnnnnnnnnnnnnnnnnnnnnnnnnnnnnnnnnnnnnnnnnnnnnnnnnnnnnnnnnnnnnnnnnnnnnnnnnnnnnnnnnnnnnnnnnnnnnnnnnnnnnnnnnnnnnnnnnnnnnnnnnnnnnnnnnnnnnnnnnnnnnnnnnnnnnnnnnnnnnnnnnnnnnnnnnnnnnnnnnnnnnnnnnnnnnnnnnnnnnnnnnnnnnnnnnnnnnnnnnnnnnnnnnnnnnnnnnnnnnnnnnnnnnnnnnnnnnnnnnnnnnnnnnnnnnnnnnnnnnnnnnnnnnnnnnnnnnnnnnnnnnnnnnnnnnnnnnnnnnnnnnnnnnnnnnnnnnnnnnnnnnnnnnnnnnnnnnnnnnnnnnnnnnnnnnnnnnnnnnnnnnnnnnnnnnnnnnnnnnnnnnnnnnnnnnnnnnnnnnnnnnnnnnnnnnnnnnnnnnnnnnnnnnnnnnnnnnnnnnnnnnnnnnnnnnnnnnnnnnnnnnnnnnnnnnnnnnnnnnnnnnnnnnnnnnnnnnnnnnnnnnnnnnnnnnnnnnnnnnnnnnnnnnnnnnnnnnnnnnnnnnnnnnnnnnnnnnnnnnnnnnnnnnnnnnnnnnnnnnnnnnnnnnnnnnnnnnnnnnnnnnnnnnnnnnnnnnnnnnnnnnnnnnnnnnnnnnnnnnnnnnnnnnnnnnnnnnnnnnnnnnnnnnnnnnnnnnnnnnnnnnnnnnnnnnnnnnnnnnnnnnnnnnnnnnnnnnnnnnnnnnnnnnnnnnnnnnnnnnnnnnnnnnnnnnnnnnnnnnnnnnnnnnnnnnnnnnnnnnnnnnnnnnnnnnnnnnnnnnnnnnnnnnnnnnnnnnnnnnnnnnnnnnnnnnnnnnnnnnnnnnnnnnnnnnnnnnnnnnnnnnnnnnnnnnnnnnnnnnnnnnnnnnnnnnnnnnnnnnnnnnnnnnnnnnnnnnnnnnnnnnnnnnnnnnnnnnnnnnnnnnnnnnnnnnnnnnnnnnnnnnnnnnnnnnnnnnnnnnnnnnnnnnnnnnnnnnnnnnnnnnnnnnnnnnnnnnnnnnnnnnnnnnnnnnnnnnnnnnnnnnnnnnnnnnnnnnnnnnnnnnnnnnnnnnnnnnnnnnnnnnnnnnnnnnnnnnnnnnnnnnnnnnnnnnnnnnnnnnnnnnnnnnnnnnnnnnnnnnnnnnnnnnnnnnnnnnnnnnnnnnnnnnnnnnnnnnnnnnnnnnnnnnnnnnnnnnnnnnnnnnnnnnnnnnnnnnnnnnnnnnnnnnnnnnnnnnnnnnnnnnnnnnnnnnnnnnnnnnnnnnnnnnnnnnnnnnnnnnnnnnnnnnnnnnnnnnnnnnnnnnnnnnnnnnnnnnnnnnnnnnnnnnnnnnnnnnnnnnnnnnnnnnnnnnnnnnnnnnnnnnnnnnnnnnnnnnnnnnnnnnnnnnnnnnnnnnnnnnnnnnnnnnnnnnnnnnnnnnnnnnnnnnnnnnnnnnnnnnnnnnnnnnnnnnnnnnnnnnnnnnnnnnnnnnnnnnnnnnnnnnnnnnnnnnnnnnnnnnnnnnnnnnnnnnnnnnnnnnnnnnnnnnnnnnnnnnnnnnnnnnnnnnnnnnnnnnnnnnnnnnnnnnnnnnnnnnnnnnnnnnnnnnnnnnnnnnnnnnnnnnnnnnnnnnnnnnnnnnnnnnnnnnnnnnnnnnnnnnnnnnnnnnnnnnnnnnnnnnnnnnnnnnnnnnnnnnnnnnnnnnnnnnnnnnnnnnnnnnnnnnnnnnnnnnnnnnnnnnnnnnnnnnnnnnnnnnnnnnnnnnnnnnnnnnnnnnnnnnnnnnnnnnnnnnnnnnnnnnnnnnnnnnnnnnnnnnnnnnnnnnnnnnnnnnnnnnnnnnnnnnnnnnnnnnnnnnnnnnnnnnnnnnnnnnnnnnnnnnnnnnnnnnnnnnnnnnnnnnnnnnnnnnnnnnnnnnnnnnnnnnnnnnnnnnnnnnnnnnnnnnnnnnnnnnnnnnnnnnnnnnnnnnnnnnnnnnnnnnnnnnnnnnnnnnnnnnnnnnnnnnnnnnnnnnnnnnnnnnnnnnnnnnnnnnnnnnnnnnnnnnnnnnnnnnnnnnnnnnnnnnnnnnnnnnnnnnnnnnnnnnnnnnnnnnnnnnnnnnnnnnnnnnnnnnnnnnnnnnnnnnnnnnnnnnnnnnnnnnnnnnnnnnnnnnnnnnnnnnnnnnnnnnnnnnnnnnnnnnnnnnnnnnnnnnnnnnnnnnnnnnnnnnnnnnnnnnnnnnnnnnnnnnnnnnnnnnnnnnnnnnnnnnnnnnnnnnnnnnnnnnnnnnnnnnnnnnnnnnnnnnnnnnnnnnnnnnnnnnnnnnnnnnnnnnnnnnnnnnnnnnnnnnnnnnnnnnnnnnnnnnnnnnnnnnnnnnnnnnnnnnnnnnnnnnnnnnnnnnnnnnnnnnnnnnnnnnnnnnnnnnnnnnnnnnnnnnnnnnnnnnnnnnnnnnnnnnnnnnnnnnnnnnnnnnnnnnnnnnnnnnnnnnnnnnnnnnnnnnnnnnnnnnnnnnnnnnnnnnnnnnnnnnnnnnnnnnnnnnnnnnnnnnnnnnnnnnnnnnnnnnnnnnnnnnnnnnnnnnnnnnnnnnnnnnnnnnnnnnnnnnnnnnnnnnnnnnnnnnnnnnnnnnnnnnnnnnnnnnnnnnnnnnnnnnnnnnnnnnnnnnnnnnnnnnnnnnnnnnnnnnnnnnnnnnnnnnnnnnnnnnnnnnnnnnnnnnnnnnnnnnnnnnnnnnnnnnnnnnnnnnnnnnnnnnnnnnnnnnnnnnnnnnnnnnnnnnnnnnnnnnnnnnnnnnnnnnnnnnnnnnnnnnnnnnnnnnnnnnnnnnnnnnnnnnnnnnnnnnnnnnnnnnnnnnnnnnnnnnnnnnnnnnnnnnnnnnnnnnnnnnnnnnnnnnnnnnnnnnnnnnnnnnnnnnnnnnnnnnnnnnnnnnnnnnnnnnnnnnnnnnnnnnnnnnnnnnnnnnnnnnnnnnnnnnnnnnnnnnnnnnnnnnnnnnnnnnnnnnnnnnnnnnnnnnnnnnnnnnnnnnnnnnnnnnnnnnnnnnnnnnnnnnnnnnnnnnnnnnnnnnnnnnnnnnnnnnnnnnnnnnnnnnnnnnnnnnnnnnnnnnnnnnnnnnnnnnnnnnnnnnnnnnnnnnnnnnnnnnnnnnnnnnnnnnnnnnnnnnnnnnnnnnnnnnnnnnnnnnnnnnnnnnnnnnnnnnnnnnnnnnnnnnnnnnnnnnnnnnnnnnnnnnnnnnnnnnnnnnnnnnnnnnnnnnnnnnnnnnnnnnnnnnnnnnnnnnnnnnnnnnnnnnnnnnnnnnnnnnnnnnnnnnnnnnnnnnnnnnnnnnnnnnnnnnnnnnnnnnnnnnnnnnnnnnnnnnnnnnnnnnnnnnnnnnnnnnnnnnnnnnnnnnnnnnnnnnnnnnnnnnnnnnnnnnnnnnnnnnnnnnnnnnnnnnnnnnnnnnnnnnnnnnnnnnnnnnnnnnnnnnnnnnnnnnnnnnnnnnnnnnnnnnnnnnnnnnnnnnnnnnnnnnnnnnnnnnnnnnnnnnnnnnnnnnnnnnnnnnnnnnnnnnnnnnnnnnnnnnnnnnnnnnnnnnnnnnnnnnnnnnnnnnnnnnnnnnnnnnnnnnnnnnnnnnnnnnnnnnnnnnnnnnnnnnnnnnnnnnnnnnnnnnnnnnnnnnnnnnnnnnnnnnnnnnnnnnnnnnnnnnnnnnnnnnnnnnnnnnnnnnnnnnnnnnnnnnnnnnnnnnnnnnnnnnnnnnnnnnnnnnnnnnnnnnnnnnnnnnnnnnnnnnnnnnnnnnnnnnnnnnnnnnnnnnnnnnnnnnnnnnnnnnnnnnnnnnnnnnnnnnnnnnnnnnnnnnnnnnnnnnnnnnnnnnnnnnnnnnnnnnnnnnnnnnnnnnnnnnnnnnnnnnnnnnnnnnnnnnnnnnnnnnnnnnnnnnnnnnnnnnnnnnnnnnnnnnnnnnnnnnnnnnnnnnnnnnnnnnnnnnnnnnnnnnnnnnnnnnnnnnnnnnnnnnnnnnnnnnnnnnnnnnnnnnnnnnnnnnnnnnnnnnnnnnnnnnnnnnnnnnnnnnnnnnnnnnnnnnnnnnnnnnnnnnnnnnnnnnnnnnnnnnnnnnnnnnnnnnnnnnnnnnnnnnnnnnnnnnnnnnnnnnnnnnnnnnnnnnnnnnnnnnnnnnnnnnnnnnnnnnnnnnnnnnnnnnnnnnnnnnnnnnnnnnnnnnnnnnnnnnnnnnnnnnnnnnnnnnnnnnnnnnnnnnnnnnnnnnnnnnnnnnnnnnnnnnnnnnnnnnnnnnnnnnnnnnnnnnnnnnnnnnnnnnnnnnnnnnnnnnnnnnnnnnnnnnnnnnnnnnnnnnnnnnnnnnnnnnnnnnnnnnnnnnnnnnnnnnnnnnnnnnnnnnnnnnnnnnnnnnnnnnnnnnnnnnnnnnnnnnnnnnnnnnnnnnnnnnnnnnnnnnnnnnnnnnnnnnnnnnnnnnnnnnnnnnnnnnnnnnnnnnnnnnnnnnnnnnnnnnnnnnnnnnnnnnnnnnnnnnnnnnnnnnnnnnnnnnnnnnnnnnnnnnnnnnnnnnnnnnnnnnnnnnnnnnnnnnnnnnnnnnnnnnnnnnnnnnnnnnnnnnnnnnnnnnnnnnnnnnnnnnnnnnnnnnnnnnnnnnnnnnnnnnnnnnnnnnnnnnnnnnnnnnnnnnnnnnnnnnnnnnnnnnnnnnnnnnnnnnnnnnnnnnnnnnnnnnnnnnnnnnnnnnnnnnnnnnnnnnnnnnnnnnnnnnnnnnnnnnnnnnnnnnnnnnnnnnnnnnnnnnnnnnnnnnnnnnnnnnnnnnnnnnnnnnnnnnnnnnnnnnnnnnnnnnnnnnnnnnnnnnnnnnnnnnnnnnnnnnnnnnnnnnnnnnnnnnnnnnnnnnnnnnnnnnnnnnnnnnnnnnnnnnnnnnnnnnnnnnnnnnnnnnnnnnnnnnnnnnnnnnnnnnnnnnnnnnnnnnnnnnnnnnnnnnnnnnnnnnnnnnnnnnnnnnnnnnnnnnnnnnnnnnnnnnnnnnnnnnnnnnnnnnnnnnnnnnnnnnnnnnnnnnnnnnnnnnnnnnnnnnnnnnnnnnnnnnnnnnnnnnnnnnnnnnnnnnnnnnnnnnnnnnnnnnnnnnnnnnnnnnnnnnnnnnnnnnnnnnnnnnnnnnnnnnnnnnnnnnnnnnnnnnnnnnnnnnnnnnnnnnnnnnnnnnnnnnnnnnnnnnnnnnnnnnnnnnnnnnnnnnnnnnnnnnnnnnnnnnnnnnnnnnnnnnnnnnnnnnnnnnnnnnnnnnnnnnnnnnnnnnnnnnnnnnnnnnnnnnnnnnnnnnnnnnnnnnnnnnnnnnnnnnnnnnnnnnnnnnnnnnnnnnnnnnnnnnnnnnnnnnnnnnnnnnnnnnnnnnnnnnnnnnnnnnnnnnnnnnnnnnnnnnnnnnnnnnnnnnnnnnnnnnnnnnnnnnnnnnnnnnnnnnnnnnnnnnnnnnnnnnnnnnnnnnnnnnnnnnnnnnnnnnnnnnnnnnnnnnnnnnnnnnnnnnnnnnnnnnnnnnnnnnnnnnnnnnnnnnnnnnnnnnnnnnnnnnnnnnnnnnnnnnnnnnnnnnnnnnnnnnnnnnnnnnnnnnnnnnnnnnnnnnnnnnnnnnnnnnnnnnnnnnnnnnnnnnnnnnnnnnnnnnnnnnnnnnnnnnnnnnnnnnnnnnnnnnnnnnnnnnnnnnnnnnnnnnnnnnnnnnnnnnnnnnnnnnnnnnnnnnnnnnnnnnnnnnnnnnnnnnnnnnnnnnnnnnnnnnnnnnnnnnnnnnnnnnnnnnnnnnnnnnnnnnnnnnnnnnnnnnnnnnnnnnnnnnnnnnnnnnnnnnnnnnnnnnnnnnnnnnnnnnnnnnnnnnnnnnnnnnnnnnnnnnnnnnnnnnnnnnnnnnnnnnnnnnnnnnnnnnnnnnnnnnnnnnnnnnnnnnnnnnnnnnnnnnnnnnnnnnnnnnnnnnnnnnnnnnnnnnnnnnnnnnnnnnnnnnnnnnnnnnnnnnnnnnnnnnnnnnnnnnnnnnnnnnnnnnnnnnnnnnnnnnnnnnnnnnnnnnnnnnnnnnnnnnnnnnnnnnnnnnnnnnnnnnnnnnnnnnnnnnnnnnnnnnnnnnnnnnnnnnnnnnnnnnnnnnnnnnnnnnnnnnnnnnnnnnnnnnnnnnnnnnnnnnnnnnnnnnnnnnnnnnnnnnnnnnnnnnnnnnnnnnnnnnnnnnnnnnnnnnnnnnnnnnnnnnnnnnnnnnnnnnnnnnnnnnnnnnnnnnnnnnnnnnnnnnnnnnnnnnnnnnnnnnnnnnnnnnnnnnnnnnnnnnnnnnnnnnnnnnnnnnnnnnnnnnnnnnnnnnnnnnnnnnnnnnnnnnnnnnnnnnnnnnnnnnnnnnnnnnnnnnnnnnnnnnnnnnnnnnnnnnnnnnnnnnnnnnnnnnnnnnnnnnnnnnnnnnnnnnnnnnnnnnnnnnnnnnnnnnnnnnnnnnnnnnnnnnnnnnnnnnnnnnnnnnnnnnnnnnnnnnnnnnnnnnnnnnnnnnnnnnnnnnnnnnnnnnnnnnnnnnnnnnnnnnnnnnnnnnnnnnnnnnnnnnnnnnnnnnnnnnnnnnnnnnnnnnnnnnnnnnnnnnnnnnnnnnnnnnnnnnnnnnnnnnnnnnnnnnnnnnnnnnnnnnnnnnnnnnnnnnnnnnnnnnnnnnnnnnnnnnnnnnnnnnnnnnnnnnnnnnnnnnnnnnnnnnnnnnnnnnnnnnnnnnnnnnnnnnnnnnnnnnnnnnnnnnnnnnnnnnnnnnnnnnnnnnnnnnnnnnnnnnnnnnnnnnnnnnnnnnnnnnnnnnnnnnnnnnnnnnnnnnnnnnnnnnnnnnnnnnnnnnnnnnnnnnnnnnnnnnnnnnnnnnnnnnnnnnnnnnnnnnnnnnnnnnnnnnnnnnnnnnnnnnnnnnnnnnnnnnnnnnnnnnnnnnnnnnnnnnnnnnnnnnnnnnnnnnnnnnnnnnnnnnnnnnnnnnnnnnnnnnnnnnnnnnnnnnnnnnnnnnnnnnnnnnnnnnnnnnnnnnnnnnnnnnnnnnnnnnnnnnnnnnnnnnnnnnnnnnnnnnnnnnnnnnnnnnnnnnnnnnnnnnnnnnnnnnnnnnnnnnnnnnnnnnnnnnnnnnnnnnnnnnnnnnnnnnnnnnnnnnnnnnnnnnnnnnnnnnnnnnnnnnnnnnnnnnnnnnnnnnnnnnnnnnnnnnnnnnnnnnnnnnnnnnnnnnnnnnnnnnnnnnnnnnnnnnnnnnnnnnnnnnnnnnnnnnnnnnnnnnnnnnnnnnnnnnnnnnnnnnnnnnnnnnnnnnnnnnnnnnnnnnnnnnnnnnnnnnnnnnnnnnnnnnnnnnnnnnnnnnnnnnnnnnnnnnnnnnnnnnnnnnnnnnnnnnnnnnnnnnnnnnnnnnnnnnnnnnnnnnnnnnnnnnnnnnnnnnnnnnnnnnnnnnnnnnnnnnnnnnnnnnnnnnnnnnnnnnnnnnnnnnnnnnnnnnnnnnnnnnnnnnnnnnnnnnnnnnnnnnnnnnnnnnnnnnnnnnnnnnnnnnnnnnnnnnnnnnnnnnnnnnnnnnnnnnnnnnnnnnnnnnnnnnnnnnnnnnnnnnnnnnnnnnnnnnnnnnnnnnnnnnnnnnnnnnnnnnnnnnnnnnnnnnnnnnnnnnnnnnnnnnnnnnnnnnnnnnnnnnnnnnnnnnnnnnnnnnnnnnnnnnnnnnnnnnnnnnnnnnnnnnnnnnnnnnnnnnnnnnnnnnnnnnnnnnnnnnnnnnnnnnnnnnnnnnnnnnnnnnnnnnnnnnnnnnnnnnnnnnnnnnnnnnnnnnnnnnnnnnnnnnnnnnnnnnnnnnnnnnnnnnnnnnnnnnnnnnnnnnnnnnnnnnnnnnnnnnnnnnnnnnnnnnnnnnnnnnnnnnnnnnnnnnnnnnnnnnnnnnnnnnnnnnnnnnnnnnnnnnnnnnnnnnnnnnnnnnnnnnnnnnnnnnnnnnnnnnnnnnnnnnnnnnnnnnnnnnnnnnnnnnnnnnnnnnnnnnnnnnnnnnnnnnnnnnnnnnnnnnnnnnnnnnnnnnnnnnnnnnnnnnnnnnnnnnnnnnnnnnnnnnnnnnnnnnnnnnnnnnnnnnnnnnnnnnnnnnnnnnnnnnnnnnnnnnnnnnnnnnnnnnnnnnnnnnnnnnnnnnnnnnnnnnnnnnnnnnnnnnnnnnnnnnnnnnnnnnnnnnnnnnnnnnnnnnnnnnnnnnnnnnnnnnnnnnnnnnnnnnnnnnnnnnnnnnnnnnnnnnnnnnnnnnnnnnnnnnnnnnnnnnnnnnnnnnnnnnnnnnnnnnnnnnnnnnnnnnnnnnnnnnnnnnnnnnnnnnnnnnnnnnnnnnnnnnnnnnnnnnnnnnnnnnnnnnnnnnnnnnnnnnnnnnnnnnnnnnnnnnnnnnnnnnnnnnnnnnnnnnnnnnnnnnnnnnnnnnnnnnnnnnnnnnnnnnnnnnnnnnnnnnnnnnnnnnnnnnnnnnnnnnnnnnnnnnnnnnnnnnnnnnnnnnnnnnnnnnnnnnnnnnnnnnnnnnnnnnnnnnnnnnnnnnnnnnnnnnnnnnnnnnnnnnnnnnnnnnnnnnnnnnnnnnnnnnnnnnnnnnnnnnnnnnnnnnnnnnnnnnnnnnnnnnnnnnnnnnnnnnnnnnnnnnnnnnnnnnnnnnnnnnnnnnnnnnnnnnnnnnnnnnnnnnnnnnnnnnnnnnnnnnnnnnnnnnnnnnnnnnnnnnnnnnnnnnnnnnnnnnnnnnnnnnnnnnnnnnnnnnnnnnnnnnnnnnnnnnnnnnnnnnnnnnnnnnnnnnnnnnnnnnnnnnnnnnnnnnnnnnnnnnnnnnnnnnnnnnnnnnnnnnnnnnnnnnnnnnnnnnnnnnnnnnnnnnnnnnnnnnnnnnnnnnnnnnnnnnnnnnnnnnnnnnnnnnnnnnnnnnnnnnnnnnnnnnnnnnnnnnnnnnnnnnnnnnnnnnnnnnnnnnnnnnnnnnnnnnnnnnnnnnnnnnnnnnnnnnnnnnnnnnnnnnnnnnnnnnnnnnnnnnnnnnnnnnnnnnnnnnnnnnnnnnnnnnnnnnnnnnnnnnnnnnnnnnnnnnnnnnnnnnnnnnnnnnnnnnnnnnnnnnnnnnnnnnnnnnnnnnnnnnnnnnnnnnnnnnnnnnnnnnnnnnnnnnnnnnnnnnnnnnnnnnnnnnnnnnnnnnnnnnnnnnnnnnnnnnnnnnnnnnnnnnnnnnnnnnnnnnnnnnnnnnnnnnnnnnnnnnnnnnnnnnnnnnnnnnnnnnnnnnnnnnnnnnnnnnnnnnnnnnnnnnnnnnnnnnnnnnnnnnnnnnnnnnnnnnnnnnnnnnnnnnnnnnnnnnnnnnnnnnnnnnnnnnnnnnnnnnnnnnnnnnnnnnnnnnnnnnnnnnnnnnnnnnnnnnnnnnnnnnnnnnnnnnnnnnnnnnnnnnnnnnnnnnnnnnnnnnnnnnnnnnnnnnnnnnnnnnnnnnnnnnnnnnnnnnnnnnnnnnnnnnnnnnnnnnnnnnnnnnnnnnnnnnnnnnnnnnnnnnnnnnnnnnnnnnnnnnnnnnnnnnnnnnnnnnnnnnnnnnnnnnnnnnnnnnnnnnnnnnnnnnnnnnnnnnnnnnnnnnnnnnnnnnnnnnnnnnnnnnnnnnnnnnnnnnnnnnnnnnnnnnnnnnnnnnnnnnnnnnnnnnnnnnnnnnnnnnnnnnnnnnnnnnnnnnnnnnnnnnnnnnnnnnnnnnnnnnnnnnnnnnnnnnnnnnnnnnnnnnnnnnnnnnnnnnnnnnnnnnnnnnnnnnnnnnnnnnnnnnnnnnnnnnnnnnnnnnnnnnnnnnnnnnnnnnnnnnnnnnnnnnnnnnnnnnnnnnnnnnnnnnnnnnnnnnnnnnnnnnnnnnnnnnnnnnnnnnnnnnnnnnnnnnnnnnnnnnnnnnnnnnnnnnnnnnnnnnnnnnnnnnnnnnnnnnnnnnnnnnnnnnnnnnnnnnnnnnnnnnnnnnnnnnnnnnnnnnnnnnnnnnnnnnnnnnnnnnnnnnnnnnnnnnnnnnnnnnnnnnnnnnnnnnnnnnnnnnnnnnnnnnnnnnnnnnnnnnnnnnnnnnnnnnnnnnnnnnnnnnnnnnnnnnnnnnnnnnnnnnnnnnnnnnnnnnnnnnnnnnnnnnnnnnnnnnnnnnnnnnnnnnnnnnnnnnnnnnnnnnnnnnnnnnnnnnnnnnnnnnnnnnnnnnnnnnnnnnnnnnnnnnnnnnnnnnnnnnnnnnnnnnnnnnnnnnnnnnnnnnnnnnnnnnnnnnnnnnnnnnnnnnnnnnnnnnnnnnnnnnnnnnnnnnnnnnnnnnnnnnnnnnnnnnnnnnnnnnnnnnnnnnnnnnnnnnnnnnnnnnnnnnnnnnnnnnnnnnnnnnnnnnnnnnnnnnnnnnnnnnnnnnnnnnnnnnnnnnnnnnnnnnnnnnnnnnnnnnnnnnnnnnnnnnnnnnnnnnnnnnnnnnnnnnnnnnnnnnnnnnnnnnnnnnnnnnnnnnnnnnnnnnnnnnnnnnnnnnnnnnnnnnnnnnnnnnnnnnnnnnnnnnnnnnnnnnnnnnnnnnnnnnnnnnnnnnnnnnnnnnnnnnnnnnnnnnnnnnnnnnnnnnnnnnnnnnnnnnnnnnnnnnnnnnnnnnnnnnnnnnnnnnnnnnnnnnnnnnnnnnnnnnnnnnnnnnnnnnnnnnnnnnnnnnnnnnnnnnnnnnnnnnnnnnnnnnnnnnnnnnnnnnnnnnnnnnnnnnnnnnnnnnnnnnnnnnnnnnnnnnnnnnnnnnnnnnnnnnnnnnnnnnnnnnnnnnnnnnnnnnnnnnnnnnnnnnnnnnnnnnnnnnnnnnnnnnnnnnnnnnnnnnnnnnnnnnnnnnnnnnnnnnnnnnnnnnnnnnnnnnnnnnnnnnnnnnnnnnnnnnnnnnnnnnnnnnnnnnnnnnnnnnnnnnnnnnnnnnnnnnnnnnnnnnnnnnnnnnnnnnnnnnnnnnnnnnnnnnnnnnnnnnnnnnnnnnnnnnnnnnnnnnnnnnnnnnnnnnnnnnnnnnnnnnnnnnnnnnnnnnnnnnnnnnnnnnnnnnnnnnnnnnnnnnnnnnnnnnnnnnnnnnnnnnnnnnnnnnnnnnnnnnnnnnnnnnnnnnnnnnnnnnnnnnnnnnnnnnnnnnnnnnnnnnnnnnnnnnnnnnnnnnnnnnnnnnnnnnnnnnnnnnnnnnnnnnnnnnnnnnnnnnnnnnnnnnnnnnnnnnnnnnnnnnnnnnnnnnnnnnnnnnnnnnnnnnnnnnnnnnnnnnnnnnnnnnnnnnnnnnnnnnnnnnnnnnnnnnnnnnnnnnnnnnnnnnnnnnnnnnnnnnnnnnnnnnnnnnnnnnnnnnnnnnnnnnnnnnnnnnnnnnnnnnnnnnnnnnnnnnnnnnnnnnnnnnnnnnnnnnnnnnnnnnnnnnnnnnnnnnnnnnnnnnnnnnnnnnnnnnnnnnnnnnnnnnnnnnnnnnnnnnnnnnnnnnnnnnnnnnnnnnnnnnnnnnnnnnnnnnnnnnnnnnnnnnnnnnnnnnnnnnnnnnnnnnnnnnnnnnnnnnnnnnnnnnnnnnnnnnnnnnnnnnnnnnnnnnnnnnnnnnnnnnnnnnnnnnnnnnnnnnnnnnnnnnnnnnnnnnnnnnnnnnnnnnnnnnnnnnnnnnnnnnnnnnnnnnnnnnnnnnnnnnnnnnnnnnnnnnnnnnnnnnnnnnnnnnnnnnnnnnnnnnnnnnnnnnnnnnnnnnnnnnnnnnnnnnnnnnnnnnnnnnnnnnnnnnnnnnnnnnnnnnnnnnnnnnnnnnnnnnnnnnnnnnnnnnnnnnnnnnnnnnnnnnnnnnnnnnnnnnnnnnnnnnnnnnnnnnnnnnnnnnnnnnnnnnnnnnnnnnnnnnnnnnnnnnnnnnnnnnnnnnnnnnnnnnnnnnnnnnnnnnnnnnnnnnnnnnnnnnnnnnnnnnnnnnnnnnnnnnnnnnnnnnnnnnnnnnnnnnnnnnnnnnnnnnnnnnnnnnnnnnnnnnnnnnnnnnnnnnnnnnnnnnnnnnnnnnnnnnnnnnnnnnnnnnnnnnnnnnnnnnnnnnnnnnnnnnnnnnnnnnnnnnnnnnnnnnnnnnnnnnnnnnnnnnnnnnnnnnnnnnnnnnnnnnnnnnnnnnnnnnnnnnnnnnnnnnnnnnnnnnnnnnnnnnnnnnnnnnnnnnnnnnnnnnnnnnnnnnnnnnnnnnnnnnnnnnnnnnnnnnnnnnnnnnnnnnnnnnnnnnnnnnnnnnnnnnnnnnnnnnnnnnnnnnnnnnnnnnnnnnnnnnnnnnnnnnnnnnnnnnnnnnnnnnnnnnnnnnnnnnnnnnnnnnnnnnnnnnnnnnnnnnnnnnnnnnnnnnnnnnnnnnnnnnnnnnnnnnnnnnnnnnnnnnnnnnnnnnnnnnnnnnnnnnnnnnnnnnnnnnnnnnnnnnnnnnnnnnnnnnnnnnnnnnnnnnnnnnnnnnnnnnnnnnnnnnnnnnnnnnnnnnnnnnnnnnnnnnnnnnnnnnnnnnnnnnnnnnnnnnnnnnnnnnnnnnnnnnnnnnnnnnnnnnnnnnnnnnnnnnnnnnnnnnnnnnnnnnnnnnnnnnnnnnnnnnnnnnnnnnnnnnnnnnnnnnnnnnnnnnnnnnnnnnnnnnnnnnnnnnnnnnnnnnnnnnnnnnnnnnnnnnnnnnnnnnnnnnnnnnnnnnnnnnnnnnnnnnnnnnnnnnnnnnnnnnnnnnnnnnnnnnnnnnnnnnnnnnnnnnnnnnnnnnnnnnnnnnnnnnnnnnnnnnnnnnnnnnnnnnnnnnnnnnnnnnnnnnnnnnnnnnnnnnnnnnnnnnnnnnnnnnnnnnnnnnnnnnnnnnnnnnnnnnnnnnnnnnnnnnnnnnnnnnnnnnnnnnnnnnnnnnnnnnnnnnnnnnnnnnnnnnnnnnnnnnnnnnnnnnnnnnnnnnnnnnnnnnnnnnnnnnnnnnnnnnnnnnnnnnnnnnnnnnnnnnnnnnnnnnnnnnnnnnnnnnnnnnnnnnnnnnnnnnnnnnnnnnnnnnnnnnnnnnnnnnnnnnnnnnnnnnnnnnnnnnnnnnnnnnnnnnnnnnnnnnnnnnnnnnnnnnnnnnnnnnnnnnnnnnnnnnnnnnnnnnnnnnnnnnnnnnnnnnnnnnnnnnnnnnnnnnnnnnnnnnnnnnnnnnnnnnnnnnnnnnnnnnnnnnnnnnnnnnnnnnnnnnnnnnnnnnnnnnnnnnnnnnnnnnnnnnnnnnnnnnnnnnnnnnnnnnnnnnnnnnnnnnnnnnnnnnnnnnnnnnnnnnnnnnnnnnnnnnnnnnnnnnnnnnnnnnnnnnnnnnnnnnnnnnnnnnnnnnnnnnnnnnnnnnnnnnnnnnnnnnnnnnnnnnnnnnnnnnnnnnnnnnnnnnnnnnnnnnnnnnnnnnnnnnnnnnnnnnnnnnnnnnnnnnnnnnnnnnnnnnnnnnnnnnnnnnnnnnnnnnnnnnnnnnnnnnnnnnnnnnnnnnnnnnnnnnnnnnnnnnnnnnnnnnnnnnnnnnnnnnnnnnnnnnnnnnnnnnnnnnnnnnnnnnnnnnnnnnnnnnnnnnnnnnnnnnnnnnnnnnnnnnnnnnnnnnnnnnnnnnnnnnnnnnnnnnnnnnnnnnnnnnnnnnnnnnnnnnnnnnnnnnnnnnnnnnnnnnnnnnnnnnnnnnnnnnnnnnnnnnnnnnnnnnnnnnnnnnnnnnnnnnnnnnnnnnnnnnnnnnnnnnnnnnnnnnnnnnnnnnnnnnnnnnnnnnnnnnnnnnnnnnnnnnnnnnnnnnnnnnnnnnnnnnnnnnnnnnnnnnnnnnnnnnnnnnnnnnnnnnnnnnnnnnnnnnnnnnnnnnnnnnnnnnnnnnnnnnnnnnnnnnnnnnnnnnnnnnnnnnnnnnnnnnnnnnnnnnnnnnnnnnnnnnnnnnnnnnnnnnnnnnnnnnnnnnnnnnnnnnnnnnnnnnnnnnnnnnnnnnnnnnnnnnnnnnnnnnnnnnnnnnnnnnnnnnnnnnnnnnnnnnnnnnnnnnnnnnnnnnnnnnnnnnnnnnnnnnnnnnnnnnnnnnnnnnnnnnnnnnnnnnnnnnnnnnnnnnnnnnnnnnnnnnnnnnnnnnnnnnnnnnnnnnnnnnnnnnnnnnnnnnnnnnnnnnnnnnnnnnnnnnnnnnnnnnnnnnnnnnnnnnnnnnnnnnnnnnnnnnnnnnnnnnnnnnnnnnnnnnnnnnnnnnnnnnnnnnnnnnnnnnnnnnnnnnnnnnnnnnnnnnnnnnnnnnnnnnnnnnnnnnnnnnnnnnnnnnnnnnnnnnnnnnnnnnnnnnnnnnnnnnnnnnnnnnnnnnnnnnnnnnnnnnnnnnnnnnnnnnnnnnnnnnnnnnnnnnnnnnnnnnnnnnnnnnnnnnnnnnnnnnnnnnnnnnnnnnnnnnnnnnnnnnnnnnnnnnnnnnnnnnnnnnnnnnnnnnnnnnnnnnnnnnnnnnnnnnnnnnnnnnnnnnnnnnnnnnnnnnnnnnnnnnnnnnnnnnnnnnnnnnnnnnnnnnnnnnnnnnnnnnnnnnnnnnnnnnnnnnnnnnnnnnnnnnnnnnnnnnnnnnnnnnnnnnnnnnnnnnnnnnnnnnnnnnnnnnnnnnnnnnnnnnnnnnnnnnnnnnnnnnnnnnnnnnnnnnnnnnnnnnnnnnnnnnnnnnnnnnnnnnnnnnnnnnnnnnnnnnnnnnnnnnnnnnnnnnnnnnnnnnnnnnnnnnnnnnnnnnnnnnnnnnnnnnnnnnnnnnnnnnnnnnnnnnnnnnnnnnnnnnnnnnnnnnnnnnnnnnnnnnnnnnnnnnnnnnnnnnnnnnnnnnnnnnnnnnnnnnnnnnnnnnnnnnnnnnnnnnnnnnnnnnnnnnnnnnnnnnnnnnnnnnnnnnnnnnnnnnnnnnnnnnnnnnnnnnnnnnnnnnnnnnnnnnnnnnnnnnnnnnnnnnnnnnnnnnnnnnnnnnnnnnnnnnnnnnnnnnnnnnnnnnnnnnnnnnnnnnnnnnnnnnnnnnnnnnnnnnnnnnnnnnnnnnnnnnnnnnnnnnnnnnnnnnnnnnnnnnnnnnnnnnnnnnnnnnnnnnnnnnnnnnnnnnnnnnnnnnnnnnnnnnnnnnnnnnnnnnnnnnnnnnnnnnnnnnnnnnnnnnnnnnnnnnnnnnnnnnnnnnnnnnnnnnnnnnnnnnnnnnnnnnnnnnnnnnnnnnnnnnnnnnnnnnnnnnnnnnnnnnnnnnnnnnnnnnnnnnnnnnnnnnnnnnnnnnnnnnnnnnnnnnnnnnnnnnnnnnnnnnnnnnnnnnnnnnnnnnnnnnnnnnnnnnnnnnnnnnnnnnnnnnnnnnnnnnnnnnnnnnnnnnnnnnnnnnnnnnnnnnnnnnnnnnnnnnnnnnnnnnnnnnnnnnnnnnnnnnnnnnnnnnnnnnnnnnnnnnnnnnnnnnnnnnnnnnnnnnnnnnnnnnnnnnnnnnnnnnnnnnnnnnnnnnnnnnnnnnnnnnnnnnnnnnnnnnnnnnnnnnnnnnnnnnnnnnnnnnnnnnnnnnnnnnnnnnnnnnnnnnnnnnnnnnnnnnnnnnnnnnnnnnnnnnnnnnnnnnnnnnnnnnnnnnnnnnnnnnnnnnnnnnnnnnnnnnnnnnnnnnnnnnnnnnnnnnnnnnnnnnnnnnnnnnnnnnnnnnnnnnnnnnnnnnnnnnnnnnnnnnnnnnnnnnnnnnnnnnnnnnnnnnnnnnnnnnnnnnnnnnnnnnnnnnnnnnnnnnnnnnnnnnnnnnnnnnnnnnnnnnnnnnnnnnnnnnnnnnnnnnnnnnnnnnnnnnnnnnnnnnnnnnnnnnnnnnnnnnnnnnnnnnnnnnnnnnnnnnnnnnnnnnnnnnnnnnnnnnnnnnnnnnnnnnnnnnnnnnnnnnnnnnnnnnnnnnnnnnnnnnnnnnnnnnnnnnnnnnnnnnnnnnnnnnnnnnnnnnnnnnnnnnnnnnnnnnnnnnnnnnnnnnnnnnnnnnnnnnnnnnnnnnnnnnnnnnnnnnnnnnnnnnnnnnnnnnnnnnnnnnnnnnnnnnnnnnnnnnnnnnnnnnnnnnnnnnnnnnnnnnnnnnnnnnnnnnnnnnnnnnnnnnnnnnnnnnnnnnnnnnnnnnnnnnnnnnnnnnnnnnnnnnnnnnnnnnnnnnnnnnnnnnnnnnnnnnnnnnnnnnnnnnnnnnnnnnnnnnnnnnnnnnnnnnnnnnnnnnnnnnnnnnnnnnnnnnnnnnnnnnnnnnnnnnnnnnnnnnnnnnnnnnnnnnnnnnnnnnnnnnnnnnnnnnnnnnnnnnnnnnnnnnnnnnnnnnnnnnnnnnnnnnnnnnnnnnnnnnnnnnnnnnnnnnnnnnnnnnnnnnnnnnnnnnnnnnnnnnnnnnnnnnnnnnnnnnnnnnnnnnnnnnnnnnnnnnnnnnnnnnnnnnnnnnnnnnnnnnnnnnnnnnnnnnnnnnnnnnnnnnnnnnnnnnnnnnnnnnnnnnnnnnnnnnnnnnnnnnnnnnnnnnnnnnnnnnnnnnnnnnnnnnnnnnnnnnnnnnnnnnnnnnnnnnnnnnnnnnnnnnnnnnnnnnnnnnnnnnnnnnnnnnnnnnnnnnnnnnnnnnnnnnnnnnnnnnnnnnnnnnnnnnnnnnnnnnnnnnnnnnnnnnnnnnnnnnnnnnnnnnnnnnnnnnnnnnnnnnnnnnnnnnnnnnnnnnnnnnnnnnnnnnnnnnnnnnnnnnnnnnnnnnnnnnnnnnnnnnnnnnnnnnnnnnnnnnnnnnnnnnnnnnnnnnnnnnnnnnnnnnnnnnnnnnnnnnnnnnnnnnnnnnnnnnnnnnnnnnnnnnnnnnnnnnnnnnnnnnnnnnnnnnnnnnnnnnnnnnnnnnnnnnnnnnnnnnnnnnnnnnnnnnnnnnnnnnnnnnnnnnnnnnnnnnnnnnnnnnnnnnnnnnnnnnnnnnnnnnnnnnnnnnnnnnnnnnnnnnnnnnnnnnnnnnnnnnnnnnnnnnnnnnnnnnnnnnnnnnnnnnnnnnnnnnnnnnnnnnnnnnnnnnnnnnnnnnnnnnnnnnnnnnnnnnnnnnnnnnnnnnnnnnnnnnnnnnnnnnnnnnnnnnnnnnnnnnnnnnnnnnnnnnnnnnnnnnnnnnnnnnnnnnnnnnnnnnnnnnnnnnnnnnnnnnnnnnnnnnnnnnnnnnnnnnnnnnnnnnnnnnnnnnnnnnnnnnnnnnnnnnnnnnnnnnnnnnnnnnnnnnnnnnnnnnnnnnnnnnnnnnnnnnnnnnnnnnnnnnnnnnnnnnnnnnnnnnnnnnnnnnnnnnnnnnnnnnnnnnnnnnnnnnnnnnnnnnnnnnnnnnnnnnnnnnnnnnnnnnnnnnnnnnnnnnnnnnnnnnnnnnnnnnnnnnnnnnnnnnnnnnnnnnnnnnnnnnnnnnnnnnnnnnnnnnnnnnnnnnnnnnnnnnnnnnnnnnnnnnnnnnnnnnnnnnnnnnnnnnnnnnnnnnnnnnnnnnnnnnnnnnnnnnnnnnnnnnnnnnnnnnnnnnnnnnnnnnnnnnnnnnnnnnnnnnnnnnnnnnnnnnnnnnnnnnnnnnnnnnnnnnnnnnnnnnnnnnnnnnnnnnnnnnnnnnnnnnnnnnnnnnnnnnnnnnnnnnnnnnnnnnnnnnnnnnnnnnnnnnnnnnnnnnnnnnnnnnnnnnnnnnnnnnnnnnnnnnnnnnnnnnnnnnnnnnnnnnnnnnnnnnnnnnnnnnnnnnnnnnnnnnnnnnnnnnnnnnnnnnnnnnnnnnnnnnnnnnnnnnnnnnnnnnnnnnnnnnnnnnnnnnnnnnnnnnnnnnnnnnnnnnnnnnnnnnnnnnnnnnnnnnnnnnnnnnnnnnnnnnnnnnnnnnnnnnnnnnnnnnnnnnnnnnnnnnnnnnnnnnnnnnnnnnnnnnnnnnnnnnnnnnnnnnnnnnnnnnnnnnnnnnnnnnnnnnnnnnnnnnnnnnnnnnnnnnnnnnnnnnnnnnnnnnnnnnnnnnnnnnnnnnnnnnnnnnnnnnnnnnnnnnnnnnnnnnnnnnnnnnnnnnnnnnnnnnnnnnnnnnnnnnnnnnnnnnnnnnnnnnnnnnnnnnnnnnnnnnnnnnnnnnnnnnnnnnnnnnnnnnnnnnnnnnnnnnnnnnnnnnnnnnnnnnnnnnnnnnnnnnnnnnnnnnnnnnnnnnnnnnnnnnnnnnnnnnnnnnnnnnnnnnnnnnnnnnnnnnnnnnnnnnnnnnnnnnnnnnnnnnnnnnnnnnnnnnnnnnnnnnnnnnnnnnnnnnnnnnnnnnnnnnnnnnnnnnnnnnnnnnnnnnnnnnnnnnnnnnnnnnnnnnnnnnnnnnnnnnnnnnnnnnnnnnnnnnnnnnnnnnnnnnnnnnnnnnnnnnnnnnnnnnnnnnnnnnnnnnnnnnnnnnnnnnnnnnnnnnnnnnnnnnnnnnnnnnnnnnnnnnnnnnnnnnnnnnnnnnnnnnnnnnnnnnnnnnnnnnnnnnnnnnnnnnnnnnnnnnnnnnnnnnnnnnnnnnnnnnnnnnnnnnnnnnnnnnnnnnnnnnnnnnnnnnnnnnnnnnnnnnnnnnnnnnnnnnnnnnnnnnnnnnnnnnnnnnnnnnnnnnnnnnnnnnnnnnnnnnnnnnnnnnnnnnnnnnnnnnnnnnnnnnnnnnnnnnnnnnnnnnnnnnnnnnnnnnnnnnnnnnnnnnnnnnnnnnnnnnnnnnnnnnnnnnnnnnnnnnnnnnnnnnnnnnnnnnnnnnnnnnnnnnnnnnnnnnnnnnnnnnnnnnnnnnnnnnnnnnnnnnnnnnnnnnnnnnnnnnnnnnnnnnnnnnnnnnnnnnnnnnnnnnnnnnnnnnnnnnnnnnnnnnnnnnnnnnnnnnnnnnnnnnnnnnnnnnnnnnnnnnnnnnnnnnnnnnnnnnnnnnnnnnnnnnnnnnnnnnnnnnnnnnnnnnnnnnnnnnnnnnnnnnnnnnnnnnnnnnnnnnnnnnnnnnnnnnnnnnnnnnnnnnnnnnnnnnnnnnnnnnnnnnnnnnnnnnnnnnnnnnnnnnnnnnnnnnnnnnnnnnnnnnnnnnnnnnnnnnnnnnnnnnnnnnnnnnnnnnnnnnnnnnnnnnnnnnnnnnnnnnnnnnnnnnnnnnnnnnnnnnnnnnnnnnnnnnnnnnnnnnnnnnnnnnnnnnnnnnnnnnnnnnnnnnnnnnnnnnnnnnnnnnnnnnnnnnnnnnnnnnnnnnnnnnnnnnnnnnnnnnnnnnnnnnnnnnnnnnnnnnnnnnnnnnnnnnnnnnnnnnnnnnnnnnnnnnnnnnnnnnnnnnnnnnnnnnnnnnnnnnnnnnnnnnnnnnnnnnnnnnnnnnnnnnnnnnnnnnnnnnnnnnnnnnnnnnnnnnnnnnnnnnnnnnnnnnnnnnnnnnnnnnnnnnnnnnnnnnnnnnnnnnnnnnnnnnnnnnnnnnnnnnnnnnnnnnnnnnnnnnnnnnnnnnnnnnnnnnnnnnnnnnnnnnnnnnnnnnnnnnnnnnnnnnnnnnnnnnnnnnnnnnnnnnnnnnnnnnnnnnnnnnnnnnnnnnnnnnnnnnnnnnnnnnnnnnnnnnnnnnnnnnnnnnnnnnnnnnnnnnnnnnnnnnnnnnnnnnnnnnnnnnnnnnnnnnnnnnnnnnnnnnnnnnnnnnnnnnnnnnnnnnnnnnnnnnnnnnnnnnnnnnnnnnnnnnnnnnnnnnnnnnnnnnnnnnnnnnnnnnnnnnnnnnnnnnnnnnnnnnnnnnnnnnnnnnnnnnnnnnnnnnnnnnnnnnnnnnnnnnnnnnnnnnnnnnnnnnnnnnnnnnnnnnnnnnnnnnnnnnnnnnnnnnnnnnnnnnnnnnnnnnnnnnnnnnnnnnnnnnnnnnnnnnnnnnnnnnnnnnnnnnnnnnnnnnnnnnnnnnnnnnnnnnnnnnnnnnnnnnnnnnnnnnnnnnnnnnnnnnnnnnnnnnnnnnnnnnnnnnnnnnnnnnnnnnnnnnnnnnnnnnnnnnnnnnnnnnnnnnnnnnnnnnnnnnnnnnnnnnnnnnnnnnnnnnnnnnnnnnnnnnnnnnnnnnnnnnnnnnnnnnnnnnnnnnnnnnnnnnnnnnnnnnnnnnnnnnnnnnnnnnnnnnnnnnnnnnnnnnnnnnnnnnnnnnnnnnnnnnnnnnnnnnnnnnnnnnnnnnnnnnnnnnnnnnnnnnnnnnnnnnnnnnnnnnnnnnnnnnnnnnnnnnnnnnnnnnnnnnnnnnnnnnnnnnnnnnnnnnnnnnnnnnnnnnnnnnnnnnnnnnnnnnnnnnnnnnnnnnnnnnnnnnnnnnnnnnnnnnnnnnnnnnnnnnnnnnnnnnnnnnnnnnnnnnnnnnnnnnnnnnnnnnnnnnnnnnnnnnnnnnnnnnnnnnnnnnnnnnnnnnnnnnnnnnnnnnnnnnnnnnnnnnnnnnnnnnnnnnnnnnnnnnnnnnnnnnnnnnnnnnnnnnnnnnnnnnnnnnnnnnnnnnnnnnnnnnnnnnnnnnnnnnnnnnnnnnnnnnnnnnnnnnnnnnnnnnnnnnnnnnnnnnnnnnnnnnnnnnnnnnnnnnnnnnnnnnnnnnnnnnnnnnnnnnnnnnnnnnnnnnnnnnnnnnnnnnnnnnnnnnnnnnnnnnnnnnnnnnnnnnnnnnnnnnnnnnnnnnnnnnnnnnnnnnnnnnnnnnnnnnnnnnnnnnnnnnnnnnnnnnnnnnnnnnnnnnnnnnnnnnnnnnnnnnnnnnnnnnnnnnnnnnnnnnnnnnnnnnnnnnnnnnnnnnnnnnnnnnnnnnnnnnnnnnnnnnnnnnnnnnnnnnnnnnnnnnnnnnnnnnnnnnnnnnnnnnnnnnnnnnnnnnnnnnnnnnnnnnnnnnnnnnnnnnnnnnnnnnnnnnnnnnnnnnnnnnnnnnnnnnnnnnnnnnnnnnnnnnnnnnnnnnnnnnnnnnnnnnnnnnnnnnnnnnnnnnnnnnnnnnnnnnnnnnnnnnnnnnnnnnnnnnnnnnnnnnnnnnnnnnnnnnnnnnnnnnnnnnnnnnnnnnnnnnnnnnnnnnnnnnnnnnnnnnnnnnnnnnnnnnnnnnnnnnnnnnnnnnnnnnnnnnnnnnnnnnnnnnnnnnnnnnnnnnnnnnnnnnnnnnnnnnnnnnnnnnnnnnnnnnnnnnnnnnnnnnnnnnnnnnnnnnnnnnnnnnnnnnnnnnnnnnnnnnnnnnnnnnnnnnnnnnnnnnnnnnnnnnnnnnnnnnnnnnnnnnnnnnnnnnnnnnnnnnnnnnnnnnnnnnnnnnnnnnnnnnnnnnnnnnnnnnnnnnnnnnnnnnnnnnnnnnnnnnnnnnnnnnnnnnnnnnnnnnnnnnnnnnnnnnnnnnnnnnnnnnnnnnnnnnnnnnnnnnnnnnnnnnnnnnnnnnnnnnnnnnnnnnnnnnnnnnnnnnnnnnnnnnnnnnnnnnnnnnnnnnnnnnnnnnnnnnnnnnnnnnnnnnnnnnnnnnnnnnnnnnnnnnnnnnnnnnnnnnnnnnnnnnnnnnnnnnnnnnnnnnnnnnnnnnnnnnnnnnnnnnnnnnnnnnnnnnnnnnnnnnnnnnnnnnnnnnnnnnnnnnnnnnnnnnnnnnnnnnnnnnnnnnnnnnnnnnnnnnnnnnnnnnnnnnnnnnnnnnnnnnnnnnnnnnnnnnnnnnnnnnnnnnnnnnnnnnnnnnnnnnnnnnnnnnnnnnnnnnnnnnnnnnnnnnnnnnnnnnnnnnnnnnnnnnnnnnnnnnnnnnnnnnnnnnnnnnnnnnnnnnnnnnnnnnnnnnnnnnnnnnnnnnnnnnnnnnnnnnnnnnnnnnnnnnnnnnnnnnnnnnnnnnnnnnnnnnnnnnnnnnnnnnnnnnnnnnnnnnnnnnnnnnnnnnnnnnnnnnnnnnnnnnnnnnnnnnnnnnnnnnnnnnnnnnnnnnnnnnnnnnnnnnnnnnnnnnnnnnnnnnnnnnnnnnnnnnnnnnnnnnnnnnnnnnnnnnnnnnnnnnnnnnnnnnnnnnnnnnnnnnnnnnnnnnnnnnnnnnnnnnnnnnnnnnnnnnnnnnnnnnnnnnnnnnnnnnnnnnnnnnnnnnnnnnnnnnnnnnnnnnnnnnnnnnnnnnnnnnnnnnnnnnnnnnnnnnnnnnnnnnnnnnnnnnnnnnnnnnnnnnnnnnnnnnnnnnnnnnnnnnnnnnnnnnnnnnnnnnnnnnnnnnnnnnnnnnnnnnnnnnnnnnnnnnnnnnnnnnnnnnnnnnnnnnnnnnnnnnnnnnnnnnnnnnnnnnnnnnnnnnnnnnnnnnnnnnnnnnnnnnnnnnnnnnnnnnnnnnnnnnnnnnnnnnnnnnnnnnnnnnnnnnnnnnnnnnnnnnnnnnnnnnnnnnnnnnnnnnnnnnnnnnnnnnnnnnnnnnnnnnnnnnnnnnnnnnnnnnnnnnnnnnnnnnnnnnnnnnnnnnnnnnnnnnnnnnnnnnnnnnnnnnnnnnnnnnnnnnnnnnnnnnnnnnnnnnnnnnnnnnnnnnnnnnnnnnnnnnnnnnnnnnnnnnnnnnnnnnnnnnnnnnnnnnnnnnnnnnnnnnnnnnnnnnnnnnnnnnnnnnnnnnnnnnnnnnnnnnnnnnnnnnnnnnnnnnnnnnnnnnnnnnnnnnnnnnnnnnnnnnnnnnnnnnnnnnnnnnnnnnnnnnnnnnnnnnnnnnnnnnnnnnnnnnnnnnnnnnnnnnnnnnnnnnnnnnnnnnnnnnnnnnnnnnnnnnnnnnnnnnnnnnnnnnnnnnnnnnnnnnnnnnnnnnnnnnnnnnnnnnnnnnnnnnnnnnnnnnnnnnnnnnnnnnnnnnnnnnnnnnnnnnnnnnnnnnnnnnnnnnnnnnnnnnnnnnnnnnnnnnnnnnnnnnnnnnnnnnnnnnnnnnnnnnnnnnnnnnnnnnnnnnnnnnnnnnnnnnnnnnnnnnnnnnnnnnnnnnnnnnnnnnnnnnnnnnnnnnnnnnnnnnnnnnnnnnnnnnnnnnnnnnnnnnnnnnnnnnnnnnnnnnnnnnnnnnnnnnnnnnnnnnnnnnnnnnnnnnnnnnnnnnnnnnnnnnnnnnnnnnnnnnnnnnnnnnnnnnnnnnnnnnnnnnnnnnnnnnnnnnnnnnnnnnnnnnnnnnnnnnnnnnnnnnnnnnnnnnnnnnnnnnnnnnnnnnnnnnnnnnnnnnnnnnnnnnnnnnnnnnnnnnnnnnnnnnnnnnnnnnnnnnnnnnnnnnnnnnnnnnnnnnnnnnnnnnnnnnnnnnnnnnnnnnnnnnnnnnnnnnnnnnnnnnnnnnnnnnnnnnnnnnnnnnnnnnnnnnnnnnnnnnnnnnnnnnnnnnnnnnnnnnnnnnnnnnnnnnnnnnnnnnnnnnnnnnnnnnnnnnnnnnnnnnnnnnnnnnnnnnnnnnnnnnnnnnnnnnnnnnnnnnnnnnnnnnnnnnnnnnnnnnnnnnnnnnnnnnnnnnnnnnnnnnnnnnnnnnnnnnnnnnnnnnnnnnnnnnnnnnnnnnnnnnnnnnnnnnnnnnnnnnnnnnnnnnnnnnnnnnnnnnnnnnnnnnnnnnnnnnnnnnnnnnnnnnnnnnnnnnnnnnnnnnnnnnnnnnnnnnnnnnnnnnnnnnnnnnnnnnnnnnnnnnnnnnnnnnnnnnnnnnnnnnnnnnnnnnnnnnnnnnnnnnnnnnnnnnnnnnnnnnnnnnnnnnnnnnnnnnnnnnnnnnnnnnnnnnnnnnnnnnnnnnnnnnnnnnnnnnnnnnnnnnnnnnnnnnnnnnnnnnnnnnnnnnnnnnnnnnnnnnnnnnnnnnnnnnnnnnnnnnnnnnnnnnnnnnnnnnnnnnnnnnnnnnnnnnnnnnnnnnnnnnnnnnnnnnnnnnnnnnnnnnnnnnnnnnnnnnnnnnnnnnnnnnnnnnnnnnnnnnnnnnnnnnnnnnnnnnnnnnnnnnnnnnnnnnnnnnnnnnnnnnnnnnnnnnnnnnnnnnnnnnnnnnnnnnnnnnnnnnnnnnnnnnnnnnnnnnnnnnnnnnnnnnnnnnnnnnnnnnnnnnnnnnnnnnnnnnnnnnnnnnnnnnnnnnnnnnnnnnnnnnnnnnnnnnnnnnnnnnnnnnnnnnnnnnnnnnnnnnnnnnnnnnnnnnnnnnnnnnnnnnnnnnnnnnnnnnnnnnnnnnnnnnnnnnnnnnnnnnnnnnnnnnnnnnnnnnnnnnnnnnnnnnnnnnnnnnnnnnnnnnnnnnnnnnnnnnnnnnnnnnnnnnnnnnnnnnnnnnnnnnnnnnnnnnnnnnnnnnnnnnnnnnnnnnnnnnnnnnnnnnnnnnnnnnnnnnnnnnnnnnnnnnnnnnnnnnnnnnnnnnnnnnnnnnnnnnnnnnnnnnnnnnnnnnnnnnnnnnnnnnnnnnnnnnnnnnnnnnnnnnnnnnnnnnnnnnnnnnnnnnnnnnnnnnnnnnnnnnnnnnnnnnnnnnnnnnnnnnnnnnnnnnnnnnnnnnnnnnnnnnnnnnnnnnnnnnnnnnnnnnnnnnnnnnnnnnnnnnnnnnnnnnnnnnnnnnnnnnnnnnnnnnnnnnnnnnnnnnnnnnnnnnnnnnnnnnnnnnnnnnnnnnnnnnnnnnnnnnnnnnnnnnnnnnnnnnnnnnnnnnnnnnnnnnnnnnnnnnnnnnnnnnnnnnnnnnnnnnnnnnnnnnnnnnnnnnnnnnnnnnnnnnnnnnnnnnnnnnnnnnnnnnnnnnnnnnnnnnnnnnnnnnnnnnnnnnnnnnnnnnnnnnnnnnnnnnnnnnnnnnnnnnnnnnnnnnnnnnnnnnnnnnnnnnnnnnnnnnnnnnnnnnnnnnnnnnnnnnnnnnnnnnnnnnnnnnnnnnnnnnnnnnnnnnnnnnnnnnnnnnnnnnnnnnnnnnnnnnnnnnnnnnnnnnnnnnnnnnnnnnnnnnnnnnnnnnnnnnnnnnnnnnnnnnnnnnnnnnnnnnnnnnnnnnnnnnnnnnnnnnnnnnnnnnnnnnnnnnnnnnnnnnnnnnnnnnnnnnnnnnnnnnnnnnnnnnnnnnnnnnnnnnnnnnnnnnnnnnnnnnnnnnnnnnnnnnnnnnnnnnnnnnnnnnnnnnnnnnnnnnnnnnnnnnnnnnnnnnnnnnnnnnnnnnnnnnnnnnnnnnnnnnnnnnnnnnnnnnnnnnnnnnnnnnnnnnnnnnnnnnnnnnnnnnnnnnnnnnnnnnnnnnnnnnnnnnnnnnnnnnnnnnnnnnnnnnnnnnnnnnnnnnnnnnnnnnnnnnnnnnnnnnnnnnnnnnnnnnnnnnnnnnnnnnnnnnnnnnnnnnnnnnnnnnnnnnnnnnnnnnnnnnnnnnnnnnnnnnnnnnnnnnnnnnnnnnnnnnnnnnnnnnnnnnnnnnnnnnnnnnnnnnnnnnnnnnnnnnnnnnnnnnnnnnnnnnnnnnnnnnnnnnnnnnnnnnnnnnnnnnnnnnnnnnnnnnnnnnnnnnnnnnnnnnnnnnnnnnnnnnnnnnnnnnnnnnnnnnnnnnnnnnnnnnnnnnnnnnnnnnnnnnnnnnnnnnnnnnnnnnnnnnnnnnnnnnnnnnnnnnnnnnnnnnnnnnnnnnnnnnnnnnnnnnnnnnnnnnnnnnnnnnnnnnnnnnnnnnnnnnnnnnnnnnnnnnnnnnnnnnnnnnnnnnnnnnnnnnnnnnnnnnnnnnnnnnnnnnnnnnnnnnnnnnnnnnnnnnnnnnnnnnnnnnnnnnnnnnnnnnnnnnnnnnnnnnnnnnnnnnnnnnnnnnnnnnnnnnnnnnnnnnnnnnnnnnnnnnnnnnnnnnnnnnnnnnnnnnnnnnnnnnnnnnnnnnnnnnnnnnnnnnnnnnnnnnnnnnnnnnnnnnnnnnnnnnnnnnnnnnnnnnnnnnnnnnnnnnnnnnnnnnnnnnnnnnnnnnnnnnnnnnnnnnnnnnnnnnnnnnnnnnnnnnnnnnnnnnnnnnnnnnnnnnnnnnnnnnnnnnnnnnnnnnnnnnnnnnnnnnnnnnnnnnnnnnnnnnnnnnnnnnnnnnnnnnnnnnnnnnnnnnnnnnnnnnnnnnnnnnnnnnnnnnnnnnnnnnnnnnnnnnnnnnnnnnnnnnnnnnnnnnnnnnnnnnnnnnnnnnnnnnnnnnnnnnnnnnnnnnnnnnnnnnnnnnnnnnnnnnnnnnnnnnnnnnnnnnnnnnnnnnnnnnnnnnnnnnnnnnnnnnnnnnnnnnnnnnnnnnnnnnnnnnnnnnnnnnnnnnnnnnnnnnnnnnnnnnnnnnnnnnnnnnnnnnnnnnnnnnnnnnnnnnnnnnnnnnnnnnnnnnnnnnnnnnnnnnnnnnnnnnnnnnnnnnnnnnnnnnnnnnnnnnnnnnnnnnnnnnnnnnnnnnnnnnnnnnnnnnnnnnnnnnnnnnnnnnnnnnnnnnnnnnnnnnnnnnnnnnnnnnnnnnnnnnnnnnnnnnnnnnnnnnnnnnnnnnnnnnnnnnnnnnnnnnnnnnnnnnnnnnnnnnnnnnnnnnnnnnnnnnnnnnnnnnnnnnnnnnnnnnnnnnnnnnnnnnnnnnnnnnnnnnnnnnnnnnnnnnnnnnnnnnnnnnnnnnnnnnnnnnnnnnnnnnnnnnnnnnnnnnnnnnnnnnnnnnnnnnnnnnnnnnnnnnnnnnnnnnnnnnnnnnnnnnnnnnnnnnnnnnnnnnnnnnnnnnnnnnnnnnnnnnnnnnnnnnnnnnnnnnnnnnnnnnnnnnnnnnnnnnnnnnnnnnnnnnnnnnnnnnnnnnnnnnnnnnnnnnnnnnnnnnnnnnnnnnnnnnnnnnnnnnnnnnnnnnnnnnnnnnnnnnnnnnnnnnnnnnnnnnnnnnnnnnnnnnnnnnnnnnnnnnnnnnnnnnnnnnnnnnnnnnnnnnnnnnnnnnnnnnnnnnnnnnnnnnnnnnnnnnnnnnnnnnnnnnnnnnnnnnnnnnnnnnnnnnnnnnnnnnnnnnnnnnnnnnnnnnnnnnnnnnnnnnnnnnnnnnnnnnnnnnnnnnnnnnnnnnnnnnnnnnnnnnnnnnnnnnnnnnnnnnnnnnnnnnnnnnnnnnnnnnnnnnnnnnnnnnnnnnnnnnnnnnnnnnnnnnnnnnnnnnnnnnnnnnnnnnnnnnnnnnnnnnnnnnnnnnnnnnnnnnnnnnnnnnnnnnnnnnnnnnnnnnnnnnnnnnnnnnnnnnnnnnnnnnnnnnnnnnnnnnnnnnnnnnnnnnnnnnnnnnnnnnnnnnnnnnnnnnnnnnnnnnnnnnnnnnnnnnnnnnnnnnnnnnnnnnnnnnnnnnnnnnnnnnnnnnnnnnnnnnnnnnnnnnnnnnnnnnnnnnnnnnnnnnnnnnnnnnnnnnnnnnnnnnnnnnnnnnnnnnnnnnnnnnnnnnnnnnnnnnnnnnnnnnnnnnnnnnnnnnnnnnnnnnnnnnnnnnnnnnnnnnnnnnnnnnnnnnnnnnnnnnnnnnnnnnnnnnnnnnnnnnnnnnnnnnnnnnnnnnnnnnnnnnnnnnnnnnnnnnnnnnnnnnnnnnnnnnnnnnnnnnnnnnnnnnnnnnnnnnnnnnnnnnnnnnnnnnnnnnnnnnnnnnnnnnnnnnnnnnnnnnnnnnnnnnnnnnnnnnnnnnnnnnnnnnnnnnnnnnnnnnnnnnnnnnnnnnnnnnnnnnnnnnnnnnnnnnnnnnnnnnnnnnnnnnnnnnnnnnnnnnnnnnnnnnnnnnnnnnnnnnnnnnnnnnnnnnnnnnnnnnnnnnnnnnnnnnnnnnnnnnnnnnnnnnnnnnnnnnnnnnnnnnnnnnnnnnnnnnnnnnnnnnnnnnnnnnnnnnnnnnnnnnnnnnnnnnnnnnnnnnnnnnnnnnnnnnnnnnnnnnnnnnnnnnnnnnnnnnnnnnnnnnnnnnnnnnnnnnnnnnnnnnnnnnnnnnnnnnnnnnnnnnnnnnnnnnnnnnnnnnnnnnnnnnnnnnnnnnnnnnnnnnnnnnnnnnnnnnnnnnnnnnnnnnnnnnnnnnnnnnnnnnnnnnnnnnnnnnnnnnnnnnnnnnnnnnnnnnnnnnnnnnnnnnnnnnnnnnnnnnnnnnnnnnnnnnnnnnnnnnnnnnnnnnnnnnnnnnnnnnnnnnnnnnnnnnnnnnnnnnnnnnnnnnnnnnnnnnnnnnnnnnnnnnnnnnnnnnnnnnnnnnnnnnnnnnnnnnnnnnnnnnnnnnnnnnnnnnnnnnnnnnnnnnnnnnnnnnnnnnnnnnnnnnnnnnnnnnnnnnnnnnnnnnnnnnnnnnnnnnnnnnnnnnnnnnnnnnnnnnnnnnnnnnnnnnnnnnnnnnnnnnnnnnnnnnnnnnnnnnnnnnnnnnnnnnnnnnnnnnnnnnnnnnnnnnnnnnnnnnnnnnnnnnnnnnnnnnnnnnnnnnnnnnnnnnnnnnnnnnnnnnnnnnnnnnnnnnnnnnnnnnnnnnnnnnnnnnnnnnnnnnnnnnnnnnnnnnnnnnnnnnnnnnnnnnnnnnnnnnnnnnnnnnnnnnnnnnnnnnnnnnnnnnnnnnnnnnnnnnnnnnnnnnnnnnnnnnnnnnnnnnnnnnnnnnnnnnnnnnnnnnnnnnnnnnnnnnnnnnnnnnnnnnnnnnnnnnnnnnnnnnnnnnnnnnnnnnnnnnnnnnnnnnnnnnnnnnnnnnnnnnnnnnnnnnnnnnnnnnnnnnnnnnnnnnnnnnnnnnnnnnnnnnnnnnnnnnnnnnnnnnnnnnnnnnnnnnnnnnnnnnnnnnnnnnnnnnnnnnnnnnnnnnnnnnnnnnnnnnnnnnnnnnnnnnnnnnnnnnnnnnnnnnnnnnnnnnnnnnnnnnnnnnnnnnnnnnnnnnnnnnnnnnnnnnnnnnnnnnnnnnnnnnnnnnnnnnnnnnnnnnnnnnnnnnnnnnnnnnnnnnnnnnnnnnnnnnnnnnnnnnnnnnnnnnnnnnnnnnnnnnnnnnnnnnnnnnnnnnnnnnnnnnnnnnnnnnnnnnnnnnnnnnnnnnnnnnnnnnnnnnnnnnnnnnnnnnnnnnnnnnnnnnnnnnnnnnnnnnnnnnnnnnnnnnnnnnnnnnnnnnnnnnnnnnnnnnnnnnnnnnnnnnnnnnnnnnnnnnnnnnnnnnnnnnnnnnnnnnnnnnnnnnnnnnnnnnnnnnnnnnnnnnnnnnnnnnnnnnnnnnnnnnnnnnnnnnnnnnnnnnnnnnnnnnnnnnnnnnnnnnnnnnnnnnnnnnnnnnnnnnnnnnnnnnnnnnnnnnnnnnnnnnnnnnnnnnnnnnnnnnnnnnnnnnnnnnnnnnnnnnnnnnnnnnnnnnnnnnnnnnnnnnnnnnnnnnnnnnnnnnnnnnnnnnnnnnnnnnnnnnnnnnnnnnnnnnnnnnnnnnnnnnnnnnnnnnnnnnnnnnnnnnnnnnnnnnnnnnnnnnnnnnnnnnnnnnnnnnnnnnnnnnnnnnnnnnnnnnnnnnnnnnnnnnnnnnnnnnnnnnnnnnnnnnnnnnnnnnnnnnnnnnnnnnnnnnnnnnnnnnnnnnnnnnnnnnnnnnnnnnnnnnnnnnnnnnnnnnnnnnnnnnnnnnnnnnnnnnnnnnnnnnnnnnnnnnnnnnnnnnnnnnnnnnnnnnnnnnnnnnnnnnnnnnnnnnnnnnnnnnnnnnnnnnnnnnnnnnnnnnnnnnnnnnnnnnnnnnnnnnnnnnnnnnnnnnnnnnnnnnnnnnnnnnnnnnnnnnnnnnnnnnnnnnnnnnnnnnnnnnnnnnnnnnnnnnnnnnnnnnnnnnnnnnnnnnnnnnnnnnnnnnnnnnnnnnnnnnnnnnnnnnnnnnnnnnnnnnnnnnnnnnnnnnnnnnnnnnnnnnnnnnnnnnnnnnnnnnnnnnnnnnnnnnnnnnnnnnnnnnnnnnnnnnnnnnnnnnnnnnnnnnnnnnnnnnnnnnnnnnnnnnnnnnnnnnnnnnnnnnnnnnnnnnnnnnnnnnnnnnnnnnnnnnnnnnnnnnnnnnnnnnnnnnnnnnnnnnnnnnnnnnnnnnnnnnnnnnnnnnnnnnnnnnnnnnnnnnnnnnnnnnnnnnnnnnnnnnnnnnnnnnnnnnnnnnnnnnnnnnnnnnnnnnnnnnnnnnnnnnnnnnnnnnnnnnnnnnnnnnnnnnnnnnnnnnnnnnnnnnnnnnnnnnnnnnnnnnnnnnnnnnnnnnnnnnnnnnnnnnnnnnnnnnnnnnnnnnnnnnnnnnnnnnnnnnnnnnnnnnnnnnnnnnnnnnnnnnnnnnnnnnnnnnnnnnnnnnnnnnnnnnnnnnnnnnnnnnnnnnnnnnnnnnnnnnnnnnnnnnnnnnnnnnnnnnnnnnnnnnnnnnnnnnnnnnnnnnnnnnnnnnnnnnnnnnnnnnnnnnnnnnnnnnnnnnnnnnnnnnnnnnnnnnnnnnnnnnnnnnnnnnnnnnnnnnnnnnnnnnnnnnnnnnnnnnnnnnnnnnnnnnnnnnnnnnnnnnnnnnnnnnnnnnnnnnnnnnnnnnnnnnnnnnnnnnnnnnnnnnnnnnnnnnnnnnnnnnnnnnnnnnnnnnnnnnnnnnnnnnnnnnnnnnnnnnnnnnnnnnnnnnnnnnnnnnnnnnnnnnnnnnnnnnnnnnnnnnnnnnnnnnnnnnnnnnnnnnnnnnnnnnnnnnnnnnnnnnnnnnnnnnnnnnnnnnnnnnnnnnnnnnnnnnnnnnnnnnnnnnnnnnnnnnnnnnnnnnnnnnnnnnnnnnnnnnnnnnnnnnnnnnnnnnnnnnnnnnnnnnnnnnnnnnnnnnnnnnnnnnnnnnnnnnnnnnnnnnnnnnnnnnnnnnnnnnnnnnnnnnnnnnnnnnnnnnnnnnnnnnnnnnnnnnnnnnnnnnnnnnnnnnnnnnnnnnnnnnnnnnnnnnnnnnnnnnnnnnnnnnnnnnnnnnnnnnnnnnnnnnnnnnnnnnnnnnnnnnnnnnnnnnnnnnnnnnnnnnnnnnnnnnnnnnnnnnnnnnnnnnnnnnnnnnnnnnnnnnnnnnnnnnnnnnnnnnnnnnnnnnnnnnnnnnnnnnnnnnnnnnnnnnnnnnnnnnnnnnnnnnnnnnnnnnnnnnnnnnnnnnnnnnnnnnnnnnnnnnnnnnnnnnnnnnnnnnnnnnnnnnnnnnnnnnnnnnnnnnnnnnnnnnnnnnnnnnnnnnnnnnnnnnnnnnnnnnnnnnnnnnnnnnnnnnnnnnnnnnnnnnnnnnnnnnnnnnnnnnnnnnnnnnnnnnnnnnnnnnnnnnnnnnnnnnnnnnnnnnnnnnnnnnnnnnnnnnnnnnnnnnnnnnnnnnnnnnnnnnnnnnnnnnnnnnnnnnnnnnnnnnnnnnnnnnnnnnnnnnnnnnnnnnnnnnnnnnnnnnnnnnnnnnnnnnnnnnnnnnnnnnnnnnnnnnnnnnnnnnnnnnnnnnnnnnnnnnnnnnnnnnnnnnnnnnnnnnnnnnnnnnnnnnnnnnnnnnnnnnnnnnnnnnnnnnnnnnnnnnnnnnnnnnnnnnnnnnnnnnnnnnnnnnnnnnnnnnnnnnnnnnnnnnnnnnnnnnnnnnnnnnnnnnnnnnnnnnnnnnnnnnnnnnnnnnnnnnnnnnnnnnnnnnnnnnnnnnnnnnnnnnnnnnnnnnnnnnnnnnnnnnnnnnnnnnnnnnnnnnnnnnnnnnnnnnnnnnnnnnnnnnnnnnnnnnnnnnnnnnnnnnnnnnnnnnnnnnnnnnnnnnnnnnnnnnnnnnnnnnnnnnnnnnnnnnnnnnnnnnnnnnnnnnnnnnnnnnnnnnnnnnnnnnnnnnnnnnnnnnnnnnnnnnnnnnnnnnnnnnnnnnnnnnnnnnnnnnnnnnnnnnnnnnnnnnnnnnnnnnnnnnnnnnnnnnnnnnnnnnnnnnnnnnnnnnnnnnnnnnnnnnnnnnnnnnnnnnnnnnnnnnnnnnnnnnnnnnnnnnnnnnnnnnnnnnnnnnnnnnnnnnnnnnnnnnnnnnnnnnnnnnnnnnnnnnnnnnnnnnnnnnnnnnnnnnnnnnnnnnnnnnnnnnnnnnnnnnnnnnnnnnnnnnnnnnnnnnnnnnnnnnnnnnnnnnnnnnnnnnnnnnnnnnnnnnnnnnnnnnnnnnnnnnnnnnnnnnnnnnnnnnnnnnnnnnnnnnnnnnnnnnnnnnnnnnnnnnnnnnnnnnnnnnnnnnnnnnnnnnnnnnnnnnnnnnnnnnnnnnnnnnnnnnnnnnnnnnnnnnnnnnnnnnnnnnnnnnnnnnnnnnnnnnnnnnnnnnnnnnnnnnnnnnnnnnnnnnnnnnnnnnnnnnnnnnnnnnnnnnnnnnnnnnnnnnnnnnnnnnnnnnnnnnnnnnnnnnnnnnnnnnnnnnnnnnnnnnnnnnnnnnnnnnnnnnnnnnnnnnnnnnnnnnnnnnnnnnnnnnnnnnnnnnnnnnnnnnnnnnnnnnnnnnnnnnnnnnnnnnnnnnnnnnnnnnnnnnnnnnnnnnnnnnnnnnnnnnnnnnnnnnnnnnnnnnnnnnnnnnnnnnnnnnnnnnnnnnnnnnnnnnnnnnnnnnnnnnnnnnnnnnnnnnnnnnnnnnnnnnnnnnnnnnnnnnnnnnnnnnnnnnnnnnnnnnnnnnnnnnnnnnnnnnnnnnnnnnnnnnnnnnnnnnnnnnnnnnnnnnnnnnnnnnnnnnnnnnnnnnnnnnnnnnnnnnnnnnnnnnnnnnnnnnnnnnnnnnnnnnnnnnnnnnnnnnnnnnnnnnnnnnnnnnnnnnnnnnnnnnnnnnnnnnnnnnnnnnnnnnnnnnnnnnnnnnnnnnnnnnnnnnnnnnnnnnnnnnnnnnnnnnnnnnnnnnnnnnnnnnnnnnnnnnnnnnnnnnnnnnnnnnnnnnnnnnnnnnnnnnnnnnnnnnnnnnnnnnnnnnnnnnnnnnnnnnnnnnnnnnnnnnnnnnnnnnnnnnnnnnnnnnnnnnnnnnnnnnnnnnnnnnnnnnnnnnnnnnnnnnnnnnnnnnnnnnnnnnnnnnnnnnnnnnnnnnnnnnnnnnnnnnnnnnnnnnnnnnnnnnnnnnnnnnnnnnnnnnnnnnnnnnnnnnnnnnnnnnnnnnnnnnnnnnnnnnnnnnnnnnnnnnnnnnnnnnnnnnnnnnnnnnnnnnnnnnnnnnnnnnnnnnnnnnnnnnnnnnnnnnnnnnnnnnnnnnnnnnnnnnnnnnnnnnnnnnnnnnnnnnnnnnnnnnnnnnnnnnnnnnnnnnnnnnnnnnnnnnnnnnnnnnnnnnnnnnnnnnnnnnnnnnnnnnnnnnnnnnnnnnnnnnnnnnnnnnnnnnnnnnnnnnnnnnnnnnnnnnnnnnnnnnnnnnnnnnnnnnnnnnnnnnnnnnnnnnnnnnnnnnnnnnnnnnnnnnnnnnnnnnnnnnnnnnnnnnnnnnnnnnnnnnnnnnnnnnnnnnnnnnnnnnnnnnnnnnnnnnnnnnnnnnnnnnnnnnnnnnnnnnnnnnnnnnnnnnnnnnnnnnnnnnnnnnnnnnnnnnnnnnnnnnnnnnnnnnnnnnnnnnnnnnnnnnnnnnnnnnnnnnnnnnnnnnnnnnnnnnnnnnnnnnnnnnnnnnnnnnnnnnnnnnnnnnnnnnnnnnnnnnnnnnnnnnnnnnnnnnnnnnnnnnnnnnnnnnnnnnnnnnnnnnnnnnnnnnnnnnnnnnnnnnnnnnnnnnnnnnnnnnnnnnnnnnnnnnnnnnnnnnnnnnnnnnnnnnnnnnnnnnnnnnnnnnnnnnnnnnnnnnnnnnnnnnnnnnnnnnnnnnnnnnnnnnnnnnnnnnnnnnnnnnnnnnnnnnnnnnnnnnnnnnnnnnnnnnnnnnnnnnnnnnnnnnnnnnnnnnnnnnnnnnnnnnnnnnnnnnnnnnnnnnnnnnnnnnnnnnnnnnnnnnnnnnnnnnnnnnnnnnnnnnnnnnnnnnnnnnnnnnnnnnnnnnnnnnnnnnnnnnnnnnnnnnnnnnnnnnnnnnnnnnnnnnnnnnnnnnnnnnnnnnnnnnnnnnnnnnnnnnnnnnnnnnnnnnnnnnnnnnnnnnnnnnnnnnnnnnnnnnnnnnnnnnnnnnnnnnnnnnnnnnnnnnnnnnnnnnnnnnnnnnnnnnnnnnnnnnnnnnnnnnnnnnnnnnnnnnnnnnnnnnnnnnnnnnnnnnnnnnnnnnnnnnnnnnnnnnnnnnnnnnnnnnnnnnnnnnnnnnnnnnnnnnnnnnnnnnnnnnnnnnnnnnnnnnnnnnnnnnnnnnnnnnnnnnnnnnnnnnnnnnnnnnnnnnnnnnnnnnnnnnnnnnnnnnnnnnnnnnnnnnnnnnnnnnnnnnnnnnnnnnnnnnnnnnnnnnnnnnnnnnnnnnnnnnnnnnnnnnnnnnnnnnnnnnnnnnnnnnnnnnnnnnnnnnnnnnnnnnnnnnnnnnnnnnnnnnnnnnnnnnnnnnnnnnnnnnnnnnnnnnnnnnnnnnnnnnnnnnnnnnnnnnnnnnnnnnnnnnnnnnnnnnnnnnnnnnnnnnnnnnnnnnnnnnnnnnnnnnnnnnnnnnnnnnnnnnnnnnnnnnnnnnnnnnnnnnnnnnnnnnnnnnnnnnnnnnnnnnnnnnnnnnnnnnnnnnnnnnnnnnnnnnnnnnnnnnnnnnnnnnnnnnnnnnnnnnnnnnnnnnnnnnnnnnnnnnnnnnnnnnnnnnnnnnnnnnnnnnnnnnnnnnnnnnnnnnnnnnnnnnnnnnnnnnnnnnnnnnnnnnnnnnnnnnnnnnnnnnnnnnnnnnnnnnnnnnnnnnnnnnnnnnnnnnnnnnnnnnnnnnnnnnnnnnnnnnnnnnnnnnnnnnnnnnnnnnnnnnnnnnnnnnnnnnnnnnnnnnnnnnnnnnnnnnnnnnnnnnnnnnnnnnnnnnnnnnnnnnnnnnnnnnnnnnnnnnnnnnnnnnnnnnnnnnnnnnnnnnnnnnnnnnnnnnnnnnnnnnnnnnnnnnnnnnnnnnnnnnnnnnnnnnnnnnnnnnnnnnnnnnnnnnnnnnnnnnnnnnnnnnnnnnnnnnnnnnnnnnnnnnnnnnnnnnnnnnnnnnnnnnnnnnnnnnnnnnnnnnnnnnnnnnnnnnnnnnnnnnnnnnnnnnnnnnnnnnnnnnnnnnnnnnnnnnnnnnnnnnnnnnnnnnnnnnnnnnnnnnnnnnnnnnnnnnnnnnnnnnnnnnnnnnnnnnnnnnnnnnnnnnnnnnnnnnnnnnnnnnnnnnnnnnnnnnnnnnnnnnnnnnnnnnnnnnnnnnnnnnnnnnnnnnnnnnnnnnnnnnnnnnnnnnnnnnnnnnnnnnnnnnnnnnnnnnnnnnnnnnnnnnnnnnnnnnnnnnnnnnnnnnnnnnnnnnnnnnnnnnnnnnnnnnnnnnnnnnnnnnnnnnnnnnnnnnnnnnnnnnnnnnnnnnnnnnnnnnnnnnnnnnnnnnnnnnnnnnnnnnnnnnnnnnnnnnnnnnnnnnnnnnnnnnnnnnnnnnnnnnnnnnnnnnnnnnnnnnnnnnnnnnnnnnnnnnnnnnnnnnnnnnnnnnnnnnnnnnnnnnnnnnnnnnnnnnnnnnnnnnnnnnnnnnnnnnnnnnnnnnnnnnnnnnnnnnnnnnnnnnnnnnnnnnnnnnnnnnnnnnnnnnnnnnnnnnnnnnnnnnnnnnnnnnnnnnnnnnnnnnnnnnnnnnnnnnnnnnnnnnnnnnnnnnnnnnnnnnnnnnnnnnnnnnnnnnnnnnnnnnnnnnnnnnnnnnnnnnnnnnnnnnnnnnnnnnnnnnnnnnnnnnnnnnnnnnnnnnnnnnnnnnnnnnnnnnnnnnnnnnnnnnnnnnnnnnnnnnnnnnnnnnnnnnnnnnnnnnnnnnnnnnnnnnnnnnnnnnnnnnnnnnnnnnnnnnnnnnnnnnnnnnnnnnnnnnnnnnnnnnnnnnnnnnnnnnnnnnnnnnnnnnnnnnnnnnnnnnnnnnnnnnnnnnnnnnnnnnnnnnnnnnnnnnnnnnnnnnnnnnnnnnnnnnnnnnnnnnnnnnnnnnnnnnnnnnnnnnnnnnnnnnnnnnnnnnnnnnnnnnnnnnnnnnnnnnnnnnnnnnnnnnnnnnnnnnnnnnnnnnnnnnnnnnnnnnnnnnnnnnnnnnnnnnnnnnnnnnnnnnnnnnnnnnnnnnnnnnnnnnnnnnnnnnnnnnnnnnnnnnnnnnnnnnnnnnnnnnnnnnnnnnnnnnnnnnnnnnnnnnnnnnnnnnnnnnnnnnnnnnnnnnnnnnnnnnnnnnnnnnnnnnnnnnnnnnnnnnnnnnnnnnnnnnnnnnnnnnnnnnnnnnnnnnnnnnnnnnnnnnnnnnnnnnnnnnnnnnnnnnnnnnnnnnnnnnnnnnnnnnnnnnnnnnnnnnnnnnnnnnnnnnnnnnnnnnnnnnnnnnnnnnnnnnnnnnnnnnnnnnnnnnnnnnnnnnnnnnnnnnnnnnnnnnnnnnnnnnnnnnnnnnnnnnnnnnnnnnnnnnnnnnnnnnnnnnnnnnnnnnnnnnnnnnnnnnnnnnnnnnnnnnnnnnnnnnnnnnnnnnnnnnnnnnnnnnnnnnnnnnnnnnnnnnnnnnnnnnnnnnnnnnnnnnnnnnnnnnnnnnnnnnnnnnnnnnnnnnnnnnnnnnnnnnnnnnnnnnnnnnnnnnnnnnnnnnnnnnnnnnnnnnnnnnnnnnnnnnnnnnnnnnnnnnnnnnnnnnnnnnnnnnnnnnnnnnnnnnnnnnnnnnnnnnnnnnnnnnnnnnnnnnnnnnnnnnnnnnnnnnnnnnnnnnnnnnnnnnnnnnnnnnnnnnnnnnnnnnnnnnnnnnnnnnnnnnnnnnnnnnnnnnnnnnnnnnnnnnnnnnnnnnnnnnnnnnnnnnnnnnnnnnnnnnnnnnnnnnnnnnnnnnnnnnnnnnnnnnnnnnnnnnnnnnnnnnnnnnnnnnnnnnnnnnnnnnnnnnnnnnnnnnnnnnnnnnnnnnnnnnnnnnnnnnnnnnnnnnnnnnnnnnnnnnnnnnnnnnnnnnnnnnnnnnnnnnnnnnnnnnnnnnnnnnnnnnnnnnnnnnnnnnnnnnnnnnnnnnnnnnnnnnnnnnnnnnnnnnnnnnnnnnnnnnnnnnnnnnnnnnnnnnnnnnnnnnnnnnnnnnnnnnnnnnnnnnnnnnnnnnnnnnnnnnnnnnnnnnnnnnnnnnnnnnnnnnnnnnnnnnnnnnnnnnnnnnnnnnnnnnnnnnnnnnnnnnnnnnnnnnnnnnnnnnnnnnnnnnnnnnnnnnnnnnnnnnnnnnnnnnnnnnnnnnnnnnnnnnnnnnnnnnnnnnnnnnnnnnnnnnnnnnnnnnnnnnnnnnnnnnnnnnnnnnnnnnnnnnnnnnnnnnnnnnnnnnnnnnnnnnnnnnnnnnnnnnnnnnnnnnnnnnnnnnnnnnnnnnnnnnnnnnnnnnnnnnnnnnnnnnnnnnnnnnnnnnnnnnnnnnnnnnnnnnnnnnnnnnnnnnnnnnnnnnnnnnnnnnnnnnnnnnnnnnnnnnnnnnnnnnnnnnnnnnnnnnnnnnnnnnnnnnnnnnnnnnnnnnnnnnnnnnnnnnnnnnnnnnnnnnnnnnnnnnnnnnnnnnnnnnnnnnnnnnnnnnnnnnnnnnnnnnnnnnnnnnnnnnnnnnnnnnnnnnnnnnnnnnnnnnnnnnnnnnnnnnnnnnnnnnnnnnnnnnnnnnnnnnnnnnnnnnnnnnnnnnnnnnnnnnnnnnnnnnnnnnnnnnnnnnnnnnnnnnnnnnnnnnnnnnnnnnnnnnnnnnnnnnnnnnnnnnnnnnnnnnnnnnnnnnnnnnnnnnnnnnnnnnnnnnnnnnnnnnnnnnnnnnnnnnnnnnnnnnnnnnnnnnnnnnnnnnnnnnnnnnnnnnnnnnnnnnnnnnnnnnnnnnnnnnnnnnnnnnnnnnnnnnnnnnnnnnnnnnnnnnnnnnnnnnnnnnnnnnnnnnnnnnnnnnnnnnnnnnnnnnnnnnnnnnnnnnnnnnnnnnnnnnnnnnnnnnnnnnnnnnnnnnnnnnnnnnnnnnnnnnnnnnnnnnnnnnnnnnnnnnnnnnnnnnnnnnnnnnnnnnnnnnnnnnnnnnnnnnnnnnnnnnnnnnnnnnnnnnnnnnnnnnnnnnnnnnnnnnnnnnnnnnnnnnnnnnnnnnnnnnnnnnnnnnnnnnnnnnnnnnnnnnnnnnnnnnnnnnnnnnnnnnnnnnnnnnnnnnnnnnnnnnnnnnnnnnnnnnnnnnnnnnnnnnnnnnnnnnnnnnnnnnnnnnnnnnnnnnnnnnnnnnnnnnnnnnnnnnnnnnnnnnnnnnnnnnnnnnnnnnnnnnnnnnnnnnnnnnnnnnnnnnnnnnnnnnnnnnnnnnnnnnnnnnnnnnnnnnnnnnnnnnnnnnnnnnnnnnnnnnnnnnnnnnnnnnnnnnnnnnnnnnnnnnnnnnnnnnnnnnnnnnnnnnnnnnnnnnnnnnnnnnnnnnnnnnnnnnnnnnnnnnnnnnnnnnnnnnnnnnnnnnnnnnnnnnnnnnnnnnnnnnnnnnnnnnnnnnnnnnnnnnnnnnnnnnnnnnnnnnnnnnnnnnnnnnnnnnnnnnnnnnnnnnnnnnnnnnnnnnnnnnnnnnnnnnnnnnnnnnnnnnnnnnnnnnnnnnnnnnnnnnnnnnnnnnnnnnnnnnnnnnnnnnnnnnnnnnnnnnnnnnnnnnnnnnnnnnnnnnnnnnnnnnnnnnnnnnnnnnnnnnnnnnnnnnnnnnnnnnnnnnnnnnnnnnnnnnnnnnnnnnnnnnnnnnnnnnnnnnnnnnnnnnnnnnnnnnnnnnnnnnnnnnnnnnnnnnnnnnnnnnnnnnnnnnnnnnnnnnnnnnnnnnnnnnnnnnnnnnnnnnnnnnnnnnnnnnnnnnnnnnnnnnnnnnnnnnnnnnnnnnnnnnnnnnnnnnnnnnnnnnnnnnnnnnnnnnnnnnnnnnnnnnnnnnnnnnnnnnnnnnnnnnnnnnnnnnnnnnnnnnnnnnnnnnnnnnnnnnnnnnnnnnnnnnnnnnnnnnnnnnnnnnnnnnnnnnnnnnnnnnnnnnnnnnnnnnnnnnnnnnnnnnnnnnnnnnnnnnnnnnnnnnnnnnnnnnnnnnnnnnnnnnnnnnnnnnnnnnnnnnnnnnnnnnnnnnnnnnnnnnnnnnnnnnnnnnnnnnnnnnnnnnnnnnnnnnnnnnnnnnnnnnnnnnnnnnnnnnnnnnnnnnnnnnnnnnnnnnnnnnnnnnnnnnnnnnnnnnnnnnnnnnnnnnnnnnnnnnnnnnnnnnnnnnnnnnnnnnnnnnnnnnnnnnnnnnnnnnnnnnnnnnnnnnnnnnnnnnnnnnnnnnnnnnnnnnnnnnnnnnnnnnnnnnnnnnnnnnnnnnnnnnnnnnnnnnnnnnnnnnnnnnnnnnnnnnnnnnnnnnnnnnnnnnnnnnnnnnnnnnnnnnnnnnnnnnnnnnnnnnnnnnnnnnnnnnnnnnnnnnnnnnnnnnnnnnnnnnnnnnnnnnnnnnnnnnnnnnnnnnnnnnnnnnnnnnnnnnnnnnnnnnnnnnnnnnnnnnnnnnnnnnnnnnnnnnnnnnnnnnnnnnnnnnnnnnnnnnnnnnnnnnnnnnnnnnnnnnnnnnnnnnnnnnnnnnnnnnnnnnnnnnnnnnnnnnnnnnnnnnnnnnnnnnnnnnnnnnnnnnnnnnnnnnnnnnnnnnnnnnnnnnnnnnnnnnnnnnnnnnnnnnnnnnnnnnnnnnnnnnnnnnnnnnnnnnnnnnnnnnnnnnnnnnnnnnnnnnnnnnnnnnnnnnnnnnnnnnnnnnnnnnnnnnnnnnnnnnnnnnnnnnnnnnnnnnnnnnnnnnnnnnnnnnnnnnnnnnnnnnnnnnnnnnnnnnnnnnnnnnnnnnnnnnnnnnnnnnnnnnnnnnnnnnnnnnnnnnnnnnnnnnnnnnnnnnnnnnnnnnnnnnnnnnnnnnnnnnnnnnnnnnnnnnnnnnnnnnnnnnnnnnnnnnnnnnnnnnnnnnnnnnnnnnnnnnnnnnnnnnnnnnnnnnnnnnnnnnnnnnnnnnnnnnnnnnnnnnnnnnnnnnnnnnnnnnnnnnnnnnnnnnnnnnnnnnnnnnnnnnnnnnnnnnnnnnnnnnnnnnnnnnnnnnnnnnnnnnnnnnnnnnnnnnnnnnnnnnnnnnnnnnnnnnnnnnnnnnnnnnnnnnnnnnnnnnnnnnnnnnnnnnnnnnnnnnnnnnnnnnnnnnnnnnnnnnnnnnnnnnnnnnnnnnnnnnnnnnnnnnnnnnnnnnnnnnnnnnnnnnnnnnnnnnnnnnnnnnnnnnnnnnnnnnnnnnnnnnnnnnnnnnnnnnnnnnnnnnnnnnnnnnnnnnnnnnnnnnnnnnnnnnnnnnnnnnnnnnnnnnnnnnnnnnnnnnnnnnnnnnnnnnnnnnnnnnnnnnnnnnnnnnnnnnnnnnnnnnnnnnnnnnnnnnnnnnnnnnnnnnnnnnnnnnnnnnnnnnnnnnnnnnnnnnnnnnnnnnnnnnnnnnnnnnnnnnnnnnnnnnnnnnnnnnnnnnnnnnnnnnnnnnnnnnnnnnnnnnnnnnnnnnnnnnnnnnnnnnnnnnnnnnnnnnnnnnnnnnnnnnnnnnnnnnnnnnnnnnnnnnnnnnnnnnnnnnnnnnnnnnnnnnnnnnnnnnnnnnnnnnnnnnnnnnnnnnnnnnnnnnnnnnnnnnnnnnnnnnnnnnnnnnnnnnnnnnnnnnnnnnnnnnnnnnnnnnnnnnnnnnnnnnnnnnnnnnnnnnnnnnnnnnnnnnnnnnnnnnnnnnnnnnnnnnnnnnnnnnnnnnnnnnnnnnnnnnnnnnnnnnnnnnnnnnnnnnnnnnnnnnnnnnnnnnnnnnnnnnnnnnnnnnnnnnnnnnnnnnnnnnnnnnnnnnnnnnnnnnnnnnnnnnnnnnnnnnnnnnnnnnnnnnnnnnnnnnnnnnnnnnnnnnnnnnnnnnnnnnnnnnnnnnnnnnnnnnnnnnnnnnnnnnnnnnnnnnnnnnnnnnnnnnnnnnnnnnnnnnnnnnnnnnnnnnnnnnnnnnnnnnnnnnnnnnnnnnnnnnnnnnnnnnnnnnnnnnnnnnnnnnnnnnnnnnnnnnnnnnnnnnnnnnnnnnnnnnnnnnnnnnnnnnnnnnnnnnnnnnnnnnnnnnnnnnnnnnnnnnnnnnnnnnnnnnnnnnnnnnnnnnnnnnnnnnnnnnnnnnnnnnnnnnnnnnnnnnnnnnnnnnnnnnnnnnnnnnnnnnnnnnnnnnnnnnnnnnnnnnnnnnnnnnnnnnnnnnnnnnnnnnnnnnnnnnnnnnnnnnnnnnnnnnnnnnnnnnnnnnnnnnnnnnnnnnnnnnnnnnnnnnnnnnnnnnnnnnnnnnnnnnnnnnnnnnnnnnnnnnnnnnnnnnnnnnnnnnnnnnnnnnnnnnnnnnnnnnnnnnnnnnnnnnnnnnnnnnnnnnnnnnnnnnnnnnnnnnnnnnnnnnnnnnnnnnnnnnnnnnnnnnnnnnnnnnnnnnnnnnnnnnnnnnnnnnnnnnnnnnnnnnnnnnnnnnnnnnnnnnnnnnnnnnnnnnnnnnnnnnnnnnnnnnnnnnnnnnnnnnnnnnnnnnnnnnnnnnnnnnnnnnnnnnnnnnnnnnnnnnnnnnnnnnnnnnnnnnnnnnnnnnnnnnnnnnnnnnnnnnnnnnnnnnnnnnnnnnnnnnnnnnnnnnnnnnnnnnnnnnnnnnnnnnnnnnnnnnnnnnnnnnnnnnnnnnnnnnnnnnnnnnnnnnnnnnnnnnnnnnnnnnnnnnnnnnnnnnnnnnnnnnnnnnnnnnnnnnnnnnnnnnnnnnnnnnnnnnnnnnnnnnnnnnnnnnnnnnnnnnnnnnnnnnnnnnnnnnnnnnnnnnnnnnnnnnnnnnnnnnnnnnnnnnnnnnnnnnnnnnnnnnnnnnnnnnnnnnnnnnnnnnnnnnnnnnnnnnnnnnnnnnnnnnnnnnnnnnnnnnnnnnnnnnnnnnnnnnnnnnnnnnnnnnnnnnnnnnnnnnnnnnnnnnnnnnnnnnnnnnnnnnnnnnnnnnnnnnnnnnnnnnnnnnnnnnnnnnnnnnnnnnnnnnnnnnnnnnnnnnnnnnnnnnnnnnnnnnnnnnnnnnnnnnnnnnnnnnnnnnnnnnnnnnnnnnnnnnnnnnnnnnnnnnnnnnnnnnnnnnnnnnnnnnnnnnnnnnnnnnnnnnnnnnnnnnnnnnnnnnnnnnnnnnnnnnnnnnnnnnnnnnnnnnnnnnnnnnnnnnnnnnnnnnnnnnnnnnnnnnnnnnnnnnnnnnnnnnnnnnnnnnnnnnnnnnnnnnnnnnnnnnnnnnnnnnnnnnnnnnnnnnnnnnnnnnnnnnnnnnnnnnnnnnnnnnnnnnnnnnnnnnnnnnnnnnnnnnnnnnnnnnnnnnnnnnnnnnnnnnnnnnnnnnnnnnnnnnnnnnnnnnnnnnnnnnnnnnnnnnnnnnnnnnnnnnnnnnnnnnnnnnnnnnnnnnnnnnnnnnnnnnnnnnnnnnnnnnnnnnnnnnnnnnnnnnnnnnnnnnnnnnnnnnnnnnnnnnnnnnnnnnnnnnnnnnnnnnnnnnnnnnnnnnnnnnnnnnnnnnnnnnnnnnnnnnnnnnnnnnnnnnnnnnnnnnnnnnnnnnnnnnnnnnnnnnnnnnnnnnnnnnnnnnnnnnnnnnnnnnnnnnnnnnnnnnnnnnnnnnnnnnnnnnnnnnnnnnnnnnnnnnnnnnnnnnnnnnnnnnnnnnnnnnnnnnnnnnnnnnnnnnnnnnnnnnnnnnnnnnnnnnnnnnnnnnnnnnnnnnnnnnnnnnnnnnnnnnnnnnnnnnnnnnnnnnnnnnnnnnnnnnnnnnnnnnnnnnnnnnnnnnnnnnnnnnnnnnnnnnnnnnnnnnnnnnnnnnnnnnnnnnnnnnnnnnnnnnnnnnnnnnnnnnnnnnnnnnnnnnnnnnnnnnnnnnnnnnnnnnnnnnnnnnnnnnnnnnnnnnnnnnnnnnnnnnnnnnnnnnnnnnnnnnnnnnnnnnnnnnnnnnnnnnnnnnnnnnnnnnnnnnnnnnnnnnnnnnnnnnnnnnnnnnnnnnnnnnnnnnnnnnnnnnnnnnnnnnnnnnnnnnnnnnnnnnnnnnnnnnnnnnnnnnnnnnnnnnnnnnnnnnnnnnnnnnnnnnnnnnnnnnnnnnnnnnnnnnnnnnnnnnnnnnnnnnnnnnnnnnnnnnnnnnnnnnnnnnnnnnnnnnnnnnnnnnnnnnnnnnnnnnnnnnnnnnnnnnnnnnnnnnnnnnnnnnnnnnnnnnnnnnnnnnnnnnnnnnnnnnnnnnnnnnnnnnnnnnnnnnnnnnnnnnnnnnnnnnnnnnnnnnnnnnnnnnnnnnnnnnnnnnnnnnnnnnnnnnnnnnnnnnnnnnnnnnnnnnnnnnnnnnnnnnnnnnnnnnnnnnnnnnnnnnnnnnnnnnnnnnnnnnnnnnnnnnnnnnnnnnnnnnnnnnnnnnnnnnnnnnnnnnnnnnnnnnnnnnnnnnnnnnnnnnnnnnnnnnnnnnnnnnnnnnnnnnnnnnnnnnnnnnnnnnnnnnnnnnnnnnnnnnnnnnnnnnnnnnnnnnnnnnnnnnnnnnnnnnnnnnnnnnnnnnnnnnnnnnnnnnnnnnnnnnnnnnnnnnnnnnnnnnnnnnnnnnnnnnnnnnnnnnnnnnnnnnnnnnnnnnnnnnnnnnnnnnnnnnnnnnnnnnnnnnnnnnnnnnnnnnnnnnnnnnnnnnnnnnnnnnnnnnnnnnnnnnnnnnnnnnnnnnnnnnnnnnnnnnnnnnnnnnnnnnnnnnnnnnnnnnnnnnnnnnnnnnnnnnnnnnnnnnnnnnnnnnnnnnnnnnnnnnnnnnnnnnnnnnnnnnnnnnnnnnnnnnnnnnnnnnnnnnnnnnnnnnnnnnnnnnnnnnnnnnnnnnnnnnnnnnnnnnnnnnnnnnnnnnnnnnnnnnnnnnnnnnnnnnnnnnnnnnnnnnnnnnnnnnnnnnnnnnnnnnnnnnnnnnnnnnnnnnnnnnnnnnnnnnnnnnnnnnnnnnnnnnnnnnnnnnnnnnnnnnnnnnnnnnnnnnnnnnnnnnnnnnnnnnnnnnnnnnnnnnnnnnnnnnnnnnnnnnnnnnnnnnnnnnnnnnnnnnnnnnnnnnnnnnnnnnnnnnnnnnnnnnnnnnnnnnnnnnnnnnnnnnnnnnnnnnnnnnnnnnnnnnnnnnnnnnnnnnnnnnnnnnnnnnnnnnnnnnnnnnnnnnnnnnnnnnnnnnnnnnnnnnnnnnnnnnnnnnnnnnnnnnnnnnnnnnnnnnnnnnnnnnnnnnnnnnnnnnnnnnnnnnnnnnnnnnnnnnnnnnnnnnnnnnnnnnnnnnnnnnnnnnnnnnnnnnnnnnnnnnnnnnnnnnnnnnnnnnnnnnnnnnnnnnnnnnnnnnnnnnnnnnnnnnnnnnnnnnnnnnnnnnnnnnnnnnnnnnnnnnnnnnnnnnnnnnnnnnnnnnnnnnnnnnnnnnnnnnnnnnnnnnnnnnnnnnnnnnnnnnnnnnnnnnnnnnnnnnnnnnnnnnnnnnnnnnnnnnnnnnnnnnnnnnnnnnnnnnnnnnnnnnnnnnnnnnnnnnnnnnnnnnnnnnnnnnnnnnnnnnnnnnnnnnnnnnnnnnnnnnnnnnnnnnnnnnnnnnnnnnnnnnnnnnnnnnnnnnnnnnnnnnnnnnnnnnnnnnnnnnnnnnnnnnnnnnnnnnnnnnnnnnnnnnnnnnnnnnnnnnnnnnnnnnnnnnnnnnnnnnnnnnnnnnnnnnnnnnnnnnnnnnnnnnnnnnnnnnnnnnnnnnnnnnnnnnnnnnnnnnnnnnnnnnnnnnnnnnnnnnnnnnnnnnnnnnnnnnnnnnnnnnnnnnnnnnnnnnnnnnnnnnnnnnnnnnnnnnnnnnnnnnnnnnnnnnnnnnnnnnnnnnnnnnnnnnnnnnnnnnnnnnnnnnnnnnnnnnnnnnnnnnnnnnnnnnnnnnnnnnnnnnnnnnnnnnnnnnnnnnnnnnnnnnnnnnnnnnnnnnnnnnnnnnnnnnnnnnnnnnnnnnnnnnnnnnnnnnnnnnnnnnnnnnnnnnnnnnnnnnnnnnnnnnnnnnnnnnnnnnnnnnnnnnnnnnnnnnnnnnnnnnnnnnnnnnnnnnnnnnnnnnnnnnnnnnnnnnnnnnnnnnnnnnnnnnnnnnnnnnnnnnnnnnnnnnnnnnnnnnnnnnnnnnnnnnnnnnnnnnnnnnnnnnnnnnnnnnnnnnnnnnnnnnnnnnnnnnnnnnnnnnnnnnnnnnnnnnnnnnnnnnnnnnnnnnnnnnnnnnnnnnnnnnnnnnnnnnnnnnnnnnnnnnnnnnnnnnnnnnnnnnnnnnnnnnnnnnnnnnnnnnnnnnnnnnnnnnnnnnnnnnnnnnnnnnnnnnnnnnnnnnnnnnnnnnnnnnnnnnnnnnnnnnnnnnnnnnnnnnnnnnnnnnnnnnnnnnnnnnnnnnnnnnnnnnnnnnnnnnnnnnnnnnnnnnnnnnnnnnnnnnnnnnnnnnnnnnnnnnnnnnnnnnnnnnnnnnnnnnnnnnnnnnnnnnnnnnnnnnnnnnnnnnnnnnnnnnnnnnnnnnnnnnnnnnnnnnnnnnnnnnnnnnnnnnnnnnnnnnnnnnnnnnnnnnnnnnnnnnnnnnnnnnnnnnnnnnnnnnnnnnnnnnnnnnnnnnnnnnnnnnnnnnnnnnnnnnnnnnnnnnnnnnnnnnnnnnnnnnnnnnnnnnnnnnnnnnnnnnnnnnnnnnnnnnnnnnnnnnnnnnnnnnnnnnnnnnnnnnnnnnnnnnnnnnnnnnnnnnnnnnnnnnnnnnnnnnnnnnnnnnnnnnnnnnnnnnnnnnnnnnnnnnnnnnnnnnnnnnnnnnnnnnnnnnnnnnnnnnnnnnnnnnnnnnnnnnnnnnnnnnnnnnnnnnnnnnnnnnnnnnnnnnnnnnnnnnnnnnnnnnnnnnnnnnnnnnnnnnnnnnnnnnnnnnnnnnnnnnnnnnnnnnnnnnnnnnnnnnnnnnnnnnnnnnnnnnnnnnnnnnnnnnnnnnnnnnnnnnnnnnnnnnnnnnnnnnnnnnnnnnnnnnnnnnnnnnnnnnnnnnnnnnnnnnnnnnnnnnnnnnnnnnnnnnnnnnnnnnnnnnnnnnnnnnnnnnnnnnnnnnnnnnnnnnnnnnnnnnnnnnnnnnnnnnnnnnnnnnnnnnnnnnnnnnnnnnnnnnnnnnnnnnnnnnnnnnnnnnnnnnnnnnnnnnnnnnnnnnnnnnnnnnnnnnnnnnnnnnnnnnnnnnnnnnnnnnnnnnnnnnnnnnnnnnnnnnnnnnnnnnnnnnnnnnnnnnnnnnnnnnnnnnnnnnnnnnnnnnnnnnnnnnnnnnnnnnnnnnnnnnnnnnnnnnnnnnnnnnnnnnnnnnnnnnnnnnnnnnnnnnnnnnnnnnnnnnnnnnnnnnnnnnnnnnnnnnnnnnnnnnnnnnnnnnnnnnnnnnnnnnnnnnnnnnnnnnnnnnnnnnnnnnnnnnnnnnnnnnnnnnnnnnnnnnnnnnnnnnnnnnnnnnnnnnnnnnnnnnnnnnnnnnnnnnnnnnnnnnnnnnnnnnnnnnnnnnnnnnnnnnnnnnnnnnnnnnnnnnnnnnnnnnnnnnnnnnnnnnnnnnnnnnnnnnnnnnnnnnnnnnnnnnnnnnnnnnnnnnnnnnnnnnnnnnnnnnnnnnnnnnnnnnnnnnnnnnnnnnnnnnnnnnnnnnnnnnnnnnnnnnnnnnnnnnnnnnnnnnnnnnnnnnnnnnnnnnnnnnnnnnnnnnnnnnnnnnnnnnnnnnnnnnnnnnnnnnnnnnnnnnnnnnnnnnnnnnnnnnnnnnnnnnnnnnnnnnnnnnnnnnnnnnnnnnnnnnnnnnnnnnnnnnnnnnnnnnnnnnnnnnnnnnnnnnnnnnnnnnnnnnnnnnnnnnnnnnnnnnnnnnnnnnnnnnnnnnnnnnnnnnnnnnnnnnnnnnnnnnnnnnnnnnnnnnnnnnnnnnnnnnnnnnnnnnnnnnnnnnnnnnnnnnnnnnnnnnnnnnnnnnnnnnnnnnnnnnnnnnnnnnnnnnnnnnnnnnnnnnnnnnnnnnnnnnnnnnnnnnnnnnnnnnnnnnnnnnnnnnnnnnnnnnnnnnnnnnnnnnnnnnnnnnnnnnnnnnnnnnnnnnnnnnnnnnnnnnnnnnnnnnnnnnnnnnnnnnnnnnnnnnnnnnnnnnnnnnnnnnnnnnnnnnnnnnnnnnnnnnnnnnnnnnnnnnnnnnnnnnnnnnnnnnnnnnnnnnnnnnnnnnnnnnnnnnnnnnnnnnnnnnnnnnnnnnnnnnnnnnnnnnnnnnnnnnnnnnnnnnnnnnnnnnnnnnnnnnnnnnnnnnnnnnnnnnnnnnnnnnnnnnnnnnnnnnnnnnnnnnnnnnnnnnnnnnnnnnnnnnnnnnnnnnnnnnnnnnnnnnnnnnnnnnnnnnnnnnnnnnnnnnnnnnnnnnnnnnnnnnnnnnnnnnnnnnnnnnnnnnnnnnnnnnnnnnnnnnnnnnnnnnnnnnnnnnnnnnnnnnnnnnnnnnnnnnnnnnnnnnnnnnnnnnnnnnnnnnnnnnnnnnnnnnnnnnnnnnnnnnnnnnnnnnnnnnnnnnnnnnnnnnnnnnnnnnnnnnnnnnnnnnnnnnnnnnnnnnnnnnnnnnnnnnnnnnnnnnnnnnnnnnnnnnnnnnnnnnnnnnnnnnnnnnnnnnnnnnnnnnnnnnnnnnnnnnnnnnnnnnnnnnnnnnnnnnnnnnnnnnnnnnnnnnnnnnnnnnnnnnnnnnnnnnnnnnnnnnnnnnnnnnnnnnnnnnnnnnnnnnnnnnnnnnnnnnnnnnnnnnnnnnnnnnnnnnnnnnnnnnnnnnnnnnnnnnnnnnnnnnnnnnnnnnnnnnnnnnnnnnnnnnnnnnnnnnnnnnnnnnnnnnnnnnnnnnnnnnnnnnnnnnnnnnnnnnnnnnnnnnnnnnnnnnnnnnnnnnnnnnnnnnnnnnnnnnnnnnnnnnnnnnnnnnnnnnnnnnnnnnnnnnnnnnnnnnnnnnnnnnnnnnnnnnnnnnnnnnnnnnnnnnnnnnnnnnnnnnnnnnnnnnnnnnnnnnnnnnnnnnnnnnnnnnnnnnnnnnnnnnnnnnnnnnnnnnnnnnnnnnnnnnnnnnnnnnnnnnnnnnnnnnnnnnnnnnnnnnnnnnnnnnnnnnnnnnnnnnnnnnnnnnnnnnnnnnnnnnnnnnnnnnnnnnnnnnnnnnnnnnnnnnnnnnnnnnnnnnnnnnnnnnnnnnnnnnnnnnnnnnnnnnnnnnnnnnnnnnnnnnnnnnnnnnnnnnnnnnnnnnnnnnnnnnnnnnnnnnnnnnnnnnnnnnnnnnnnnnnnnnnnnnnnnnnnnnnnnnnnnnnnnnnnnnnnnnnnnnnnnnnnnnnnnnnnnnnnnnnnnnnnnnnnnnnnnnnnnnnnnnnnnnnnnnnnnnnnnnnnnnnnnnnnnnnnnnnnnnnnnnnnnnnnnnnnnnnnnnnnnnnnnnnnnnnnnnnnnnnnnnnnnnnnnnnnnnnnnnnnnnnnnnnnnnnnnnnnnnnnnnnnnnnnnnnnnnnnnnnnnnnnnnnnnnnnnnnnnnnnnnnnnnnnnnnnnnnnnnnnnnnnnnnnnnnnnnnnnnnnnnnnnnnnnnnnnnnnnnnnnnnnnnnnnnnnnnnnnnnnnnnnnnnnnnnnnnnnnnnnnnnnnnnnnnnnnnnnnnnnnnnnnnnnnnnnnnnnnnnnnnnnnnnnnnnnnnnnnnnnnnnnnnnnnnnnnnnnnnnnnnnnnnnnnnnnnnnnnnnnnnnnnnnnnnnnnnnnnnnnnnnnnnnnnnnnnnnnnnnnnnnnnnnnnnnnnnnnnnnnnnnnnnnnnnnnnnnnnnnnnnnnnnnnnnnnnnnnnnnnnnnnnnnnnnnnnnnnnnnnnnnnnnnnnnnnnnnnnnnnnnnnnnnnnnnnnnnnnnnnnnnnnnnnnnnnnnnnnnnnnnnnnnnnnnnnnnnnnnnnnnnnnnnnnnnnnnnnnnnnnnnnnnnnnnnnnnnnnnnnnnnnnnnnnnnnnnnnnnnnnnnnnnnnnnnnnnnnnnnnnnnnnnnnnnnnnnnnnnnnnnnnnnnnnnnnnnnnnnnnnnnnnnnnnnnnnnnnnnnnnnnnnnnnnnnnnnnnnnnnnnnnnnnnnnnnnnnnnnnnnnnnnnnnnnnnnnnnnnnnnnnnnnnnnnnnnnnnnnnnnnnnnnnnnnnnnnnnnnnnnnnnnnnnnnnnnnnnnnnnnnnnnnnnnnnnnnnnnnnnnnnnnnnnnnnnnnnnnnnnnnnnnnnnnnnnnnnnnnnnnnnnnnnnnnnnnnnnnnnnnnnnnnnnnnnnnnnnnnnnnnnnnnnnnnnnnnnnnnnnnnnnnnnnnnnnnnnnnnnnnnnnnnnnnnnnnnnnnnnnnnnnnnnnnnnnnnnnnnnnnnnnnnnnnnnnnnnnnnnnnnnnnnnnnnnnnnnnnnnnnnnnnnnnnnnnnnnnnnnnnnnnnnnnnnnnnnnnnnnnnnnnnnnnnnnnnnnnnnnnnnnnnnnnnnnnnnnnnnnnnnnnnnnnnnnnnnnnnnnnnnnnnnnnnnnnnnnnnnnnnnnnnnnnnnnnnnnnnnnnnnnnnnnnnnnnnnnnnnnnnnnnnnnnnnnnnnnnnnnnnnnnnnnnnnnnnnnnnnnnnnnnnnnnnnnnnnnnnnnnnnnnnnnnnnnnnnnnnnnnnnnnnnnnnnnnnnnnnnnnnnnnnnnnnnnnnnnnnnnnnnnnnnnnnnnnnnnnnnnnnnnnnnnnnnnnnnnnnnnnnnnnnnnnnnnnnnnnnnnnnnnnnnnnnnnnnnnnnnnnnnnnnnnnnnnnnnnnnnnnnnnnnnnnnnnnnnnnnnnnnnnnnnnnnnnnnnnnnnnnnnnnnnnnnnnnnnnnnnnnnnnnnnnnnnnnnnnnnnnnnnnnnnnnnnnnnnnnnnnnnnnnnnnnnnnnnnnnnnnnnnnnnnnnnnnnnnnnnnnnnnnnnnnnnnnnnnnnnnnnnnnnnnnnnnnnnnnnnnnnnnnnnnnnnnnnnnnnnnnnnnnnnnnnnnnnnnnnnnnnnnnnnnnnnnnnnnnnnnnnnnnnnnnnnnnnnnnnnnnnnnnnnnnnnnnnnnnnnnnnnnnnnnnnnnnnnnnnnnnnnnnnnnnnnnnnnnnnnnnnnnnnnnnnnnnnnnnnnnnnnnnnnnnnnnnnnnnnnnnnnnnnnnnnnnnnnnnnnnnnnnnnnnnnnnnnnnnnnnnnnnnnnnnnnnnnnnnnnnnnnnnnnnnnnnnnnnnnnnnnnnnnnnnnnnnnnnnnnnnnnnnnnnnnnnnnnnnnnnnnnnnnnnnnnnnnnnnnnnnnnnnnnnnnnnnnnnnnnnnnnnnnnnnnnnnnnnnnnnnnnnnnnnnnnnnnnnnnnnnnnnnnnnnnnnnnnnnnnnnnnnnnnnnnnnnnnnnnnnnnnnnnnnnnnnnnnnnnnnnnnnnnnnnnnnnnnnnnnnnnnnnnnnnnnnnnnnnnnnnnnnnnnnnnnnnnnnnnnnnnnnnnnnnnnnnnnnnnnnnnnnnnnnnnnnnnnnnnnnnnnnnnnnnnnnnnnnnnnnnnnnnnnnnnnnnnnnnnnnnnnnnnnnnnnnnnnnnnnnnnnnnnnnnnnnnnnnnnnnnnnnnnnnnnnnnnnnnnnnnnnnnnnnnnnnnnnnnnnnnnnnnnnnnnnnnnnnnnnnnnnnnnnnnnnnnnnnnnnnnnnnnnnnnnnnnnnnnnnnnnnnnnnnnnnnnnnnnnnnnnnnnnnnnnnnnnnnnnnnnnnnnnnnnnnnnnnnnnnnnnnnnnnnnnnnnnnnnnnnnnnnnnnnnnnnnnnnnnnnnnnnnnnnnnnnnnnnnnnnnnnnnnnnnnnnnnnnnnnnnnnnnnnnnnnnnnnnnnnnnnnnnnnnnnnnnnnnnnnnnnnnnnnnnnnnnnnnnnnnnnnnnnnnnnnnnnnnnnnnnnnnnnnnnnnnnnnnnnnnnnnnnnnnnnnnnnnnnnnnnnnnnnnnnnnnnnnnnnnnnnnnnnnnnnnnnnnnnnnnnnnnnnnnnnnnnnnnnnnnnnnnnnnnnnnnnnnnnnnnnnnnnnnnnnnnnnnnnnnnnnnnnnnnnnnnnnnnnnnnnnnnnnnnnnnnnnnnnnnnnnnnnnnnnnnnnnnnnnnnnnnnnnnnnnnnnnnnnnnnnnnnnnnnnnnnnnnnnnnnnnnnnnnnnnnnnnnnnnnnnnnnnnnnnnnnnnnnnnnnnnnnnnnnnnnnnnnnnnnnnnnnnnnnnnnnnnnnnnnnnnnnnnnnnnnnnnnnnnnnnnnnnnnnnnnnnnnnnnnnnnnnnnnnnnnnnnnnnnnnnnnnnnnnnnnnnnnnnnnnnnnnnnnnnnnnnnnnnnnnnnnnnnnnnnnnnnnnnnnnnnnnnnnnnnnnnnnnnnnnnnnnnnnnnnnnnnnnnnnnnnnnnnnnnnnnnnnnnnnnnnnnnnnnnnnnnnnnnnnnnnnnnnnnnnnnnnnnnnnnnnnnnnnnnnnnnnnnnnnnnnnnnnnnnnnnnnnnnnnnnnnnnnnnnnnnnnnnnnnnnnnnnnnnnnnnnnnnnnnnnnnnnnnnnnnnnnnnnnnnnnnnnnnnnnnnnnnnnnnnnnnnnnnnnnnnnnnnnnnnnnnnnnnnnnnnnnnnnnnnnnnnnnnnnnnnnnnnnnnnnnnnnnnnnnnnnnnnnnnnnnnnnnnnnnnnnnnnnnnnnnnnnnnnnnnnnnnnnnnnnnnnnnnnnnnnnnnnnnnnnnnnnnnnnnnnnnnnnnnnnnnnnnnnnnnnnnnnnnnnnnnnnnnnnnnnnnnnnnnnnnnnnnnnnnnnnnnnnnnnnnnnnnnnnnnnnnnnnnnnnnnnnnnnnnnnnnnnnnnnnnnnnnnnnnnnnnnnnnnnnnnnnnnnnnnnnnnnnnnnnnnnnnnnnnnnnnnnnnnnnnnnnnnnnnnnnnnnnnnnnnnnnnnnnnnnnnnnnnnnnnnnnnnnnnnnnnnnnnnnnnnnnnnnnnnnnnnnnnnnnnnnnnnnnnnnnnnnnnnnnnnnnnnnnnnnnnnnnnnnnnnnnnnnnnnnnnnnnnnnnnnnnnnnnnnnnnnnnnnnnnnnnnnnnnnnnnnnnnnnnnnnnnnnnnnnnnnnnnnnnnnnnnnnnnnnnnnnnnnnnnnnnnnnnnnnnnnnnnnnnnnnnnnnnnnnnnnnnnnnnnnnnnnnnnnnnnnnnnnnnnnnnnnnnnnnnnnnnnnnnnnnnnnnnnnnnnnnnnnnnnnnnnnnnnnnnnnnnnnnnnnnnnnnnnnnnnnnnnnnnnnnnnnnnnnnnnnnnnnnnnnnnnnnnnnnnnnnnnnnnnnnnnnnnnnnnnnnnnnnnnnnnnnnnnnnnnnnnnnnnnnnnnnnnnnnnnnnnnnnnnnnnnnnnnnnnnnnnnnnnnnnnnnnnnnnnnnnnnnnnnnnnnnnnnnnnnnnnnnnnnnnnnnnnnnnnnnnnnnnnnnnnnnnnnnnnnnnnnnnnnnnnnnnnnnnnnnnnnnnnnnnnnnnnnnnnnnnnnnnnnnnnnnnnnnnnnnnnnnnnnnnnnnnnnnnnnnnnnnnnnnnnnnnnnnnnnnnnnnnnnnnnnnnnnnnnnnnnnnnnnnnnnnnnnnnnnnnnnnnnnnnnnnnnnnnnnnnnnnnnnnnnnnnnnnnnnnnnnnnnnnnnnnnnnnnnnnnnnnnnnnnnnnnnnnnnnnnnnnnnnnnnnnnnnnnnnnnnnnnnnnnnnnnnnnnnnnnnnnnnnnnnnnnnnnnnnnnnnnnnnnnnnnnnnnnnnnnnnnnnnnnnnnnnnnnnnnnnnnnnnnnnnnnnnnnnnnnnnnnnnnnnnnnnnnnnnnnnnnnnnnnnnnnnnnnnnnnnnnnnnnnnnnnnnnnnnnnnnnnnnnnnnnnnnnnnnnnnnnnnnnnnnnnnnnnnnnnnnnnnnnnnnnnnnnnnnnnnnnnnnnnnnnnnnnnnnnnnnnnnnnnnnnnnnnnnnnnnnnnnnnnnnnnnnnnnnnnnnnnnnnnnnnnnnnnnnnnnnnnnnnnnnnnnnnnnnnnnnnnnnnnnnnnnnnnnnnnnnnnnnnnnnnnnnnnnnnnnnnnnnnnnnnnnnnnnnnnnnnnnnnnnnnnnnnnnnnnnnnnnnnnnnnnnnnnnnnnnnnnnnnnnnnnnnnnnnnnnnnnnnnnnnnnnnnnnnnnnnnnnnnnnnnnnnnnnnnnnnnnnnnnnnnnnnnnnnnnnnnnnnnnnnnnnnnnnnnnnnnnnnnnnnnnnnnnnnnnnnnnnnnnnnnnnnnnnnnnnnnnnnnnnnnnnnnnnnnnnnnnnnnnnnnnnnnnnnnnnnnnnnnnnnnnnnnnnnnnnnnnnnnnnnnnnnnnnnnnnnnnnnnnnnnnnnnnnnnnnnnnnnnnnnnnnnnnnnnnnnnnnnnnnnnnnnnnnnnnnnnnnnnnnnnnnnnnnnnnnnnnnnnnnnnnnnnnnnnnnnnnnnnnnnnnnnnnnnnnnnnnnnnnnnnnnnnnnnnnnnnnnnnnnnnnnnnnnnnnnnnnnnnnnnnnnnnnnnnnnnnnnnnnnnnnnnnnnnnnnnnnnnnnnnnnnnnnnnnnnnnnnnnnnnnnnnnnnnnnnnnnnnnnnnnnnnnnnnnnnnnnnnnnnnnnnnnnnnnnnnnnnnnnnnnnnnnnnnnnnnnnnnnnnnnnnnnnnnnnnnnnnnnnnnnnnnnnnnnnnnnnnnnnnnnnnnnnnnnnnnnnnnnnnnnnnnnnnnnnnnnnnnnnnnnnnnnnnnnnnnnnnnnnnnnnnnnnnnnnnnnnnnnnnnnnnnnnnnnnnnnnnnnnnnnnnnnnnnnnnnnnnnnnnnnnnnnnnnnnnnnnnnnnnnnnnnnnnnnnnnnnnnnnnnnnnnnnnnnnnnnnnnnnnnnnnnnnnnnnnnnnnnnnnnnnnnnnnnnnnnnnnnnnnnnnnnnnnnnnnnnnnnnnnnnnnnnnnnnnnnnnnnnnnnnnnnnnnnnnnnnnnnnnnnnnnnnnnnnnnnnnnnnnnnnnnnnnnnnnnnnnnnnnnnnnnnnnnnnnnnnnnnnnnnnnnnnnnnnnnnnnnnnnnnnnnnnnnnnnnnnnnnnnnnnnnnnnnnnnnnnnnnnnnnnnnnnnnnnnnnnnnnnnnnnnnnnnnnnnnnnnnnnnnnnnnnnnnnnnnnnnnnnnnnnnnnnnnnnnnnnnnnnnnnnnnnnnnnnnnnnnnnnnnnnnnnnnnnnnnnnnnnnnnnnnnnnnnnnnnnnnnnnnnnnnnnnnnnnnnnnnnnnnnnnnnnnnnnnnnnnnnnnnnnnnnnnnnnnnnnnnnnnnnnnnnnnnnnnnnnnnnnnnnnnnnnnnnnnnnnnnnnnnnnnnnnnnnnnnnnnnnnnnnnnnnnnnnnnnnnnnnnnnnnnnnnnnnnnnnnnnnnnnnnnnnnnnnnnnnnnnnnnnnnnnnnnnnnnnnnnnnnnnnnnnnnnnnnnnnnnnnnnnnnnnnnnnnnnnnnnnnnnnnnnnnnnnnnnnnnnnnnnnnnnnnnnnnnnnnnnnnnnnnnnnnnnnnnnnnnnnnnnnnnnnnnnnnnnnnnnnnnnnnnnnnnnnnnnnnnnnnnnnnnnnnnnnnnnnnnnnnnnnnnnnnnnnnnnnnnnnnnnnnnnnnnnnnnnnnnnnnnnnnnnnnnnnnnnnnnnnnnnnnnnnnnnnnnnnnnnnnnnnnnnnnnnnnnnnnnnnnnnnnnnnnnnnnnnnnnnnnnnnnnnnnnnnnnnnnnnnnnnnnnnnnnnnnnnnnnnnnnnnnnnnnnnnnnnnnnnnnnnnnnnnnnnnnnnnnnnnnnnnnnnnnnnnnnnnnnnnnnnnnnnnnnnnnnnnnnnnnnnnnnnnnnnnnnnnnnnnnnnnnnnnnnnnnnnnnnnnnnnnnnnnnnnnnnnnnnnnnnnnnnnnnnnnnnnnnnnnnnnnnnnnnnnnnnnnnnnnnnnnnnnnnnnnnnnnnnnnnnnnnnnnnnnnnnnnnnnnnnnnnnnnnnnnnnnnnnnnnnnnnnnnnnnnnnnnnnnnnnnnnnnnnnnnnnnnnnnnnnnnnnnnnnnnnnnnnnnnnnnnnnnnnnnnnnnnnnnnnnnnnnnnnnnnnnnnnnnnnnnnnnnnnnnnnnnnnnnnnnnnnnnnnnnnnnnnnnnnnnnnnnnnnnnnnnnnnnnnnnnnnnnnnnnnnnnnnnnnnnnnnnnnnnnnnnnnnnnnnnnnnnnnnnnnnnnnnnnnnnnnnnnnnnnnnnnnnnnnnnnnnnnnnnnnnnnnnnnnnnnnnnnnnnnnnnnnnnnnnnnnnnnnnnnnnnnnnnnnnnnnnnnnnnnnnnnnnnnnnnnnnnnnnnnnnnnnnnnnnnnnnnnnnnnnnnnnnnnnnnnnnnnnnnnnnnnnnnnnnnnnnnnnnnnnnnnnnnnnnnnnnnnnnnnnnnnnnnnnnnnnnnnnnnnnnnnnnnnnnnnnnnnnnnnnnnnnnnnnnnnnnnnnnnnnnnnnnnnnnnnnnnnnnnnnnnnnnnnnnnnnnnnnnnnnnnnnnnnnnnnnnnnnnnnnnnnnnnnnnnnnnnnnnnnnnnnnnnnnnnnnnnnnnnnnnnnnnnnnnnnnnnnnnnnnnnnnnnnnnnnnnnnnnnnnnnnnnnnnnnnnnnnnnnnnnnnnnnnnnnnnnnnnnnnnnnnnnnnnnnnnnnnnnnnnnnnnnnnnnnnnnnnnnnnnnnnnnnnnnnnnnnnnnnnnnnnnnnnnnnnnnnnnnnnnnnnnnnnnnnnnnnnnnnnnnnnnnnnnnnnnnnnnnnnnnnnnnnnnnnnnnnnnnnnnnnnnnnnnnnnnnnnnnnnnnnnnnnnnnnnnnnnnnnnnnnnnnnnnnnnnnnnnnnnnnnnnnnnnnnnnnnnnnnnnnnnnnnnnnnnnnnnnnnnnnnnnnnnnnnnnnnnnnnnnnnnnnnnnnnnnnnnnnnnnnnnnnnnnnnnnnnnnnnnnnnnnnnnnnnnnnnnnnnnnnnnnnnnnnnnnnnnnnnnnnnnnnnnnnnnnnnnnnnnnnnnnnnnnnnnnnnnnnnnnnnnnnnnnnnnnnnnnnnnnnnnnnnnnnnnnnnnnnnnnnnnnnnnnnnnnnnnnnnnnnnnnnnnnnnnnnnnnnnnnnnnnnnnnnnnnnnnnnnnnnnnnnnnnnnnnnnnnnnnnnnnnnnnnnnnnnnnnnnnnnnnnnnnnnnnnnnnnnnnnnnnnnnnnnnnnnnnnnnnnnnnnnnnnnnnnnnnnnnnnnnnnnnnnnnnnnnnnnnnnnnnnnnnnnnnnnnnnnnnnnnnnnnnnnnnnnnnnnnnnnnnnnnnnnnnnnnnnnnnnnnnnnnnnnnnnnnnnnnnnnnnnnnnnnnnnnnnnnnnnnnnnnnnnnnnnnnnnnnnnnnnnnnnnnnnnnnnnnnnnnnnnnnnnnnnnnnnnnnnnnnnnnnnnnnnnnnnnnnnnnnnnnnnnnnnnnnnnnnnnnnnnnnnnnnnnnnnnnnnnnnnnnnnnnnnnnnnnnnnnnnnnnnnnnnnnnnnnnnnnnnnnnnnnnnnnnnnnnnnnnnnnnnnnnnnnnnnnnnnnnnnnnnnnnnnnnnnnnnnnnnnnnnnnnnnnnnnnnnnnnnnnnnnnnnnnnnnnnnnnnnnnnnnnnnnnnnnnnnnnnnnnnnnnnnnnnnnnnnnnnnnnnnnnnnnnnnnnnnnnnnnnnnnnnnnnnnnnnnnnnnnnnnnnnnnnnnnnnnnnnnnnnnnnnnnnnnnnnnnnnnnnnnnnnnnnnnnnnnnnnnnnnnnnnnnnnnnnnnnnnnnnnnnnnnnnnnnnnnnnnnnnnnnnnnnnnnnnnnnnnnnnnnnnnnnnnnnnnnnnnnnnnnnnnnnnnnnnnnnnnnnnnnnnnnnnnnnnnnnnnnnnnnnnnnnnnnnnnnnnnnnnnnnnnnnnnnnnnnnnnnnnnnnnnnnnnnnnnnnnnnnnnnnnnnnnnnnnnnnnnnnnnnnnnnnnnnnnnnnnnnnnnnnnnnnnnnnnnnnnnnnnnnnnnnnnnnnnnnnnnnnnnnnnnnnnnnnnnnnnnnnnnnnnnnnnnnnnnnnnnnnnnnnnnnnnnnnnnnnnnnnnnnnnnnnnnnnnnnnnnnnnnnnnnnnnnnnnnnnnnnnnnnnnnnnnnnnnnnnnnnnnnnnnnnnnnnnnnnnnnnnnnnnnnnnnnnnnnnnnnnnnnnnnnnnnnnnnnnnnnnnnnnnnnnnnnnnnnnnnnnnnnnnnnnnnnnnnnnnnnnnnnnnnnnnnnnnnnnnnnnnnnnnnnnnnnnnnnnnnnnnnnnnnnnnnnnnnnnnnnnnnnnnnnnnnnnnnnnnnnnnnnnnnnnnnnnnnnnnnnnnnnnnnnnnnnnnnnnnnnnnnnnnnnnnnnnnnnnnnnnnnnnnnnnnnnnnnnnnnnnnnnnnnnnnnnnnnnnnnnnnnnnnnnnnnnnnnnnnnnnnnnnnnnnnnnnnnnnnnnnnnnnnnnnnnnnnnnnnnnnnnnnnnnnnnnnnnnnnnnnnnnnnnnnnnnnnnnnnnnnnnnnnnnnnnnnnnnnnnnnnnnnnnnnnnnnnnnnnnnnnnnnnnnnnnnnnnnnnnnnnnnnnnnnnnnnnnnnnnnnnnnnnnnnnnnnnnnnnnnnnnnnnnnnnnnnnnnnnnnnnnnnnnnnnnnnnnnnnnnnnnnnnnnnnnnnnnnnnnnnnnnnnnnnnnnnnnnnnnnnnnnnnnnnnnnnnnnnnnnnnnnnnnnnnnnnnnnnnnnnnnnnnnnnnnnnnnnnnnnnnnnnnnnnnnnnnnnnnnnnnnnnnnnnnnnnnnnnnnnnnnnnnnnnnnnnnnnnnnnnnnnnnnnnnnnnnnnnnnnnnnnnnnnnnnnnnnnnnnnnnnnnnnnnnnnnnnnnnnnnnnnnnnnnnnnnnnnnnnnnnnnnnnnnnnnnnnnnnnnnnnnnnnnnnnnnnnnnnnnnnnnnnnnnnnnnnnnnnnnnnnnnnnnnnnnnnnnnnnnnnnnnnnnnnnnnnnnnnnnnnnnnnnnnnnnnnnnnnnnnnnnnnnnnnnnnnnnnnnnnnnnnnnnnnnnnnnnnnnnnnnnnnnnnnnnnnnnnnnnnnnnnnnnnnnnnnnnnnnnnnnnnnnnnnnnnnnnnnnnnnnnnnnnnnnnnnnnnnnnnnnnnnnnnnnnnnnnnnnnnnnnnnnnnnnnnnnnnnnnnnnnnnnnnnnnnnnnnnnnnnnnnnnnnnnnnnnnnnnnnnnnnnnnnnnnnnnnnnnnnnnnnnnnnnnnnnnnnnnnnnnnnnnnnnnnnnnnnnnnnnnnnnnnnnnnnnnnnnnnnnnnnnnnnnnnnnnnnnnnnnnnnnnnnnnnnnnnnnnnnnnnnnnnnnnnnnnnnnnnnnnnnnnnnnnnnnnnnnnnnnnnnnnnnnnnnnnnnnnnnnnnnnnnnnnnnnnnnnnnnnnnnnnnnnnnnnnnnnnnnnnnnnnnnnnnnnnnnnnnnnnnnnnnnnnnnnnnnnnnnnnnnnnnnnnnnnnnnnnnnnnnnnnnnnnnnnnnnnnnnnnnnnnnnnnnnnnnnnnnnnnnnnnnnnnnnnnnnnnnnnnnnnnnnnnnnnnnnnnnnnnnnnnnnnnnnnnnnnnnnnnnnnnnnnnnnnnnnnnnnnnnnnnnnnnnnnnnnnnnnnnnnnnnnnnnnnnnnnnnnnnnnnnnnnnnnnnnnnnnnnnnnnnnnnnnnnnnnnnnnnnnnnnnnnnnnnnnnnnnnnnnnnnnnnnnnnnnnnnnnnnnnnnnnnnnnnnnnnnnnnnnnnnnnnnnnnnnnnnnnnnnnnnnnnnnnnnnnnnnnnnnnnnnnnnnnnnnnnnnnnnnnnnnnnnnnnnnnnnnnnnnnnnnnnnnnnnnnnnnnnnnnnnnnnnnnnnnnnnnnnnnnnnnnnnnnnnnnnnnnnnnnnnnnnnnnnnnnnnnnnnnnnnnnnnnnnnnnnnnnnnnnnnnnnnnnnnnnnnnnnnnnnnnnnnnnnnnnnnnnnnnnnnnnnnnnnnnnnnnnnnnnnnnnnnnnnnnnnnnnnnnnnnnnnnnnnnnnnnnnnnnnnnnnnnnnnnnnnnnnnnnnnnnnnnnnnnnnnnnnnnnnnnnnnnnnnnnnnnnnnnnnnnnnnnnnnnnnnnnnnnnnnnnnnnnnnnnnnnnnnnnnnnnnnnnnnnnnnnnnnnnnnnnnnnnnnnnnnnnnnnnnnnnnnnnnnnnnnnnnnnnnnnnnnnnnnnnnnnnnnnnnnnnnnnnnnnnnnnnnnnnnnnnnnnnnnnnnnnnnnnnnnnnnnnnnnnnnnnnnnnnnnnnnnnnnnnnnnnnnnnnnnnnnnnnnnnnnnnnnnnnnnnnnnnnnnnnnnnnnnnnnnnnnnnnnnnnnnnnnnnnnnnnnnnnnnnnnnnnnnnnnnnnnnnnnnnnnnnnnnnnnnnnnnnnnnnnnnnnnnnnnnnnnnnnnnnnnnnnnnnnnnnnnnnnnnnnnnnnnnnnnnnnnnnnnnnnnnnnnnnnnnnnnnnnnnnnnnnnnnnnnnnnnnnnnnnnnnnnnnnnnnnnnnnnnnnnnnnnnnnnnnnnnnnnnnnnnnnnnnnnnnnnnnnnnnnnnnnnnnnnnnnnnnnnnnnnnnnnnnnnnnnnnnnnnnnnnnnnnnnnnnnnnnnnnnnnnnnnnnnnnnnnnnnnnnnnnnnnnnnnnnnnnnnnnnnnnnnnnnnnnnnnnnnnnnnnnnnnnnnnnnnnnnnnnnnnnnnnnnnnnnnnnnnnnnnnnnnnnnnnnnnnnnnnnnnnnnnnnnnnnnnnnnnnnnnnnnnnnnnnnnnnnnnnnnnnnnnnnnnnnnnnnnnnnnnnnnnnnnnnnnnnnnnnnnnnnnnnnnnnnnnnnnnnnnnnnnnnnnnnnnnnnnnnnnnnnnnnnnnnnnnnnnnnnnnnnnnnnnnnnnnnnnnnnnnnnnnnnnnnnnnnnnnnnnnnnnnnnnnnnnnnnnnnnnnnnnnnnnnnnnnnnnnnnnnnnnnnnnnnnnnnnnnnnnnnnnnnnnnnnnnnnnnnnnnnnnnnnnnnnnnnnnnnnnnnnnnnnnnnnnnnnnnnnnnnnnnnnnnnnnnnnnnnnnnnnnnnnnnnnnnnnnnnnnnnnnnnnnnnnnnnnnnnnnnnnnnnnnnnnnnnnnnnnnnnnnnnnnnnnnnnnnnnnnnnnnnnnnnnnnnnnnnnnnnnnnnnnnnnnnnnnnnnnnnnnnnnnnnnnnnnnnnnnnnnnnnnnnnnnnnnnnnnnnnnnnnnnnnnnnnnnnnnnnnnnnnnnnnnnnnnnnnnnnnnnnnnnnnnnnnnnnnnnnnnnnnnnnnnnnnnnnnnnnnnnnnnnnnnnnnnnnnnnnnnnnnnnnnnnnnnnnnnnnnnnnnnnnnnnnnnnnnnnnnnnnnnnnnnnnnnnnnnnnnnnnnnnnnnnnnnnnnnnnnnnnnnnnnnnnnnnnnnnnnnnnnnnnnnnnnnnnnnnnnnnnnnnnnnnnnnnnnnnnnnnnnnnnnnnnnnnnnnnnnnnnnnnnnnnnnnnnnnnnnnnnnnnnnnnnnnnnnnnnnnnnnnnnnnnnnnnnnnnnnnnnnnnnnnnnnnnnnnnnnnnnnnnnnnnnnnnnnnnnnnnnnnnnnnnnnnnnnnnnnnnnnnnnnnnnnnnnnnnnnnnnnnnnnnnnnnnnnnnnnnnnnnnnnnnnnnnnnnnnnnnnnnnnnnnnnnnnnnnnnnnnnnnnnnnnnnnnnnnnnnnnnnnnnnnnnnnnnnnnnnnnnnnnnnnnnnnnnnnnnnnnnnnnnnnnnnnnnnnnnnnnnnnnnnnnnnnnnnnnnnnnnnnnnnnnnnnnnnnnnnnnnnnnnnnnnnnnnnnnnnnnnnnnnnnnnnnnnnnnnnnnnnnnnnnnnnnnnnnnnnnnnnnnnnnnnnnnnnnnnnnnnnnnnnnnnnnnnnnnnnnnnnnnnnnnnnnnnnnnnnnnnnnnnnnnnnnnnnnnnnnnnnnnnnnnnnnnnnnnnnnnnnnnnnnnnnnnnnnnnnnnnnnnnnnnnnnnnnnnnnnnnnnnnnnnnnnnnnnnnnnnnnnnnnnnnnnnnnnnnnnnnnnnnnnnnnnnnnnnnnnnnnnnnnnnnnnnnnnnnnnnnnnnnnnnnnnnnnnnnnnnnnnnnnnnnnnnnnnnnnnnnnnnnnnnnnnnnnnnnnnnnnnnnnnnnnnnnnnnnnnnnnnnnnnnnnnnnnnnnnnnnnnnnnnnnnnnnnnnnnnnnnnnnnnnnnnnnnnnnnnnnnnnnnnnnnnnnnnnnnnnnnnnnnnnnnnnnnnnnnnnnnnnnnnnnnnnnnnnnnnnnnnnnnnnnnnnnnnnnnnnnnnnnnnnnnnnnnnnnnnnnnnnnnnnnnnnnnnnnnnnnnnnnnnnnnnnnnnnnnnnnnnnnnnnnnnnnnnnnnnnnnnnnnnnnnnnnnnnnnnnnnnnnnnnnnnnnnnnnnnnnnnnnnnnnnnnnnnnnnnnnnnnnnnnnnnnnnnnnnnnnnnnnnnnnnnnnnnnnnnnnnnnnnnnnnnnnnnnnnnnnnnnnnnnnnnnnnnnnnnnnnnnnnnnnnnnnnnnnnnnnnnnnnnnnnnnnnnnnnnnnnnnnnnnnnnnnnnnnnnnnnnnnnnnnnnnnnnnnnnnnnnnnnnnnnnnnnnnnnnnnnnnnnnnnnnnnnnnnnnnnnnnnnnnnnnnnnnnnnnnnnnnnnnnnnnnnnnnnnnnnnnnnnnnnnnnnnnnnnnnnnnnnnnnnnnnnnnnnnnnnnnnnnnnnnnnnnnnnnnnnnnnnnnnnnnnnnnnnnnnnnnnnnnnnnnnnnnnnnnnnnnnnnnnnnnnnnnnnnnnnnnnnnnnnnnnnnnnnnnnnnnnnnnnnnnnnnnnnnnnnnnnnnnnnnnnnnnnnnnnnnnnnnnnnnnnnnnnnnnnnnnnnnnnnnnnnnnnnnnnnnnnnnnnnnnnnnnnnnnnnnnnnnnnnnnnnnnnnnnnnnnnnnnnnnnnnnnnnnnnnnnnnnnnnnnnnnnnnnnnnnnnnnnnnnnnnnnnnnnnnnnnnnnnnnnnnnnnnnnnnnnnnnnnnnnnnnnnnnnnnnnnnnnnnnnnnnnnnnnnnnnnnnnnnnnnnnnnnnnnnnnnnnnnnnnnnnnnnnnnnnnnnnnnnnnnnnnnnnnnnnnnnnnnnnnnnnnnnnnnnnnnnnnnnnnnnnnnnnnnnnnnnnnnnnnnnnnnnnnnnnnnnnnnnnnnnnnnnnnnnnnnnnnnnnnnnnnnnnnnnnnnnnnnnnnnnnnnnnnnnnnnnnnnnnnnnnnnnnnnnnnnnnnnnnnnnnnnnnnnnnnnnnnnnnnnnnnnnnnnnnnnnnnnnnnnnnnnnnnnnnnnnnnnnnnnnnnnnnnnnnnnnnnnnnnnnnnnnnnnnnnnnnnnnnnnnnnnnnnnnnnnnnnnnnnnnnnnnnnnnnnnnnnnnnnnnnnnnnnnnnnnnnnnnnnnnnnnnnnnnnnnnnnnnnnnnnnnnnnnnnnnnnnnnnnnnnnnnnnnnnnnnnnnnnnnnnnnnnnnnnnnnnnnnnnnnnnnnnnnnnnnnnnnnnnnnnnnnnnnnnnnnnnnnnnnnnnnnnnnnnnnnnnnnnnnnnnnnnnnnnnnnnnnnnnnnnnnnnnnnnnnnnnnnnnnnnnnnnnnnnnnnnnnnnnnnnnnnnnnnnnnnnnnnnnnnnnnnnnnnnnnnnnnnnnnnnnnnnnnnnnnnnnnnnnnnnnnnnnnnnnnnnnnnnnnnnnnnnnnnnnnnnnnnnnnnnnnnnnnnnnnnnnnnnnnnnnnnnnnnnnnnnnnnnnnnnnnnnnnnnnnnnnnnnnnnnnnnnnnnnnnnnnnnnnnnnnnnnnnnnnnnnnnnnnnnnnnnnnnnnnnnnnnnnnnnnnnnnnnnnnnnnnnnnnnnnnnnnnnnnnnnnnnnnnnnnnnnnnnnnnnnnnnnnnnnnnnnnnnnnnnnnnnnnnnnnnnnnnnnnnnnnnnnnnnnnnnnnnnnnnnnnnnnnnnnnnnnnnnnnnnnnnnnnnnnnnnnnnnnnnnnnnnnnnnnnnnnnnnnnnnnnnnnnnnnnnnnnnnnnnnnnnnnnnnnnnnnnnnnnnnnnnnnnnnnnnnnnnnnnnnnnnnnnnnnnnnnnnnnnnnnnnnnnnnnnnnnnnnnnnnnnnnnnnnnnnnnnnnnnnnnnnnnnnnnnnnnnnnnnnnnnnnnnnnnnnnnnnnnnnnnnnnnnnnnnnnnnnnnnnnnnnnnnnnnnnnnnnnnnnnnnnnnnnnnnnnnnnnnnnnnnnnnnnnnnnnnnnnnnnnnnnnnnnnnnnnnnnnnnnnnnnnnnnnnnnnnnnnnnnnnnnnnnnnnnnnnnnnnnnnnnnnnnnnnnnnnnnnnnnnnnnnnnnnnnnnnnnnnnnnnnnnnnnnnnnnnnnnnnnnnnnnnnnnnnnnnnnnnnnnnnnnnnnnnnnnnnnnnnnnnnnnnnnnnnnnnnnnnnnnnnnnnnnnnnnnnnnnnnnnnnnnnnnnnnnnnnnnnnnnnnnnnnnnnnnnnnnnnnnnnnnnnnnnnnnnnnnnnnnnnnnnnnnnnnnnnnnnnnnnnnnnnnnnnnnnnnnnnnnnnnnnnnnnnnnnnnnnnnnnnnnnnnnnnnnnnnnnnnnnnnnnnnnnnnnnnnnnnnnnnnnnnnnnnnnnnnnnnnnnnnnnnnnnnnnnnnnnnnnnnnnnnnnnnnnnnnnnnnnnnnnnnnnnnnnnnnnnnnnnnnnnnnnnnnnnnnnnnnnnnnnnnnnnnnnnnnnnnnnnnnnnnnnnnnnnnnnnnnnnnnnnnnnnnnnnnnnnnnnnnnnnnnnnnnnnnnnnnnnnnnnnnnnnnnnnnnnnnnnnnnnnnnnnnnnnnnnnnnnnnnnnnnnnnnnnnnnnnnnnnnnnnnnnnnnnnnnnnnnnnnnnnnnnnnnnnnnnnnnnnnnnnnnnnnnnnnnnnnnnnnnnnnnnnnnnnnnnnnnnnnnnnnnnnnnnnnnnnnnnnnnnnnnnnnnnnnnnnnnnnnnnnnnnnnnnnnnnnnnnnnnnnnnnnnnnnnnnnnnnnnnnnnnnnnnnnnnnnnnnnnnnnnnnnnnnnnnnnnnnnnnnnnnnnnnnnnnnnnnnnnnnnnnnnnnnnnnnnnnnnnnnnnnnnnnnnnnnnnnnnnnnnnnnnnnnnnnnnnnnnnnnnnnnnnnnnnnnnnnnnnnnnnnnnnnnnnnnnnnnnnnnnnnnnnnnnnnnnnnnnnnnnnnnnnnnnnnnnnnnnnnnnnnnnnnnnnnnnnnnnnnnnnnnnnnnnnnnnnnnnnnnnnnnnnnnnnnnnnnnnnnnnnnnnnnnnnnnnnnnnnnnnnnnnnnnnnnnnnnnnnnnnnnnnnnnnnnnnnnnnnnnnnnnnnnnnnnnnnnnnnnnnnnnnnnnnnnnnnnnnnnnnnnnnnnnnnnnnnnnnnnnnnnnnnnnnnnnnnnnnnnnnnnnnnnnnnnnnnnnnnnnnnnnnnnnnnnnnnnnnnnnnnnnnnnnnnnnnnnnnnnnnnnnnnnnnnnnnnnnnnnnnnnnnnnnnnnnnnnnnnnnnnnnnnnnnnnnnnnnnnnnnnnnnnnnnnnnnnnnnnnnnnnnnnnnnnnnnnnnnnnnnnnnnnnnnnnnnnnnnnnnnnnnnnnnnnnnnnnnnnnnnnnnnnnnnnnnnnnnnnnnnnnnnnnnnnnnnnnnnnnnnnnnnnnnnnnnnnnnnnnnnnnnnnnnnnnnnnnnnnnnnnnnnnnnnnnnnnnnnnnnnnnnnnnnnnnnnnnnnnnnnnnnnnnnnnnnnnnnnnnnnnnnnnnnnnnnnnnnnnnnnnnnnnnnnnnnnnnnnnnnnnnnnnnnnnnnnnnnnnnnnnnnnnnnnnnnnnnnnnnnnnnnnnnnnnnnnnnnnnnnnnnnnnnnnnnnnnnnnnnnnnnnnnnnnnnnnnnnnnnnnnnnnnnnnnnnnnnnnnnnnnnnnnnnnnnnnnnnnnnnnnnnnnnnnnnnnnnnnnnnnnnnnnnnnnnnnnnnnnnnnnnnnnnnnnnnnnnnnnnnnnnnnnnnnnnnnnnnnnnnnnnnnnnnnnnnnnnnnnnnnnnnnnnnnnnnnnnnnnnnnnnnnnnnnnnnnnnnnnnnnnnnnnnnnnnnnnnnnnnnnnnnnnnnnnnnnnnnnnnnnnnnnnnnnnnnnnnnnnnnnnnnnnnnnnnnnnnnnnnnnnnnnnnnnnnnnnnnnnnnnnnnnnnnnnnnnnnnnnnnnnnnnnnnnnnnnnnnnnnnnnnnnnnnnnnnnnnnnnnnnnnnnnnnnnnnnnnnnnnnnnnnnnnnnnnnnnnnnnnnnnnnnnnnnnnnnnnnnnnnnnnnnnnnnnnnnnnnnnnnnnnnnnnnnnnnnnnnnnnnnnnnnnnnnnnnnnnnnnnnnnnnnnnnnnnnnnnnnnnnnnnnnnnnnnnnnnnnnnnnnnnnnnnnnnnnnnnnnnnnnnnnnnnnnnnnnnnnnnnnnnnnnnnnnnnnnnnnnnnnnnnnnnnnnnnnnnnnnnnnnnnnnnnnnnnnnnnnnnnnnnnnnnnnnnnnnnnnnnnnnnnnnnnnnnnnnnnnnnnnnnnnnnnnnnnnnnnnnnnnnnnnnnnnnnnnnnnnnnnnnnnnnnnnnnnnnnnnnnnnnnnnnnnnnnnnnnnnnnnnnnnnnnnnnnnnnnnnnnnnnnnnnnnnnnnnnnnnnnnnnnnnnnnnnnnnnnnnnnnnnnnnnnnnnnnnnnnnnnnnnnnnnnnnnnnnnnnnnnnnnnnnnnnnnnnnnnnnnnnnnnnnnnnnnnnnnnnnnnnnnnnnnnnnnnnnnnnnnnnnnnnnnnnnnnnnnnnnnnnnnnnnnnnnnnnnnnnnnnnnnnnnnnnnnnnnnnnnnnnnnnnnnnnnnnnnnnnnnnnnnnnnnnnnnnnnnnnnnnnnnnnnnnnnnnnnnnnnnnnnnnnnnnnnnnnnnnnnnnnnnnnnnnnnnnnnnnnnnnnnnnnnnnnnnnnnnnnnnnnnnnnnnnnnnnnnnnnnnnnnnnnnnnnnnnnnnnnnnnnnnnnnnnnnnnnnnnnnnnnnnnnnnnnnnnnnnnnnnnnnnnnnnnnnnnnnnnnnnnnnnnnnnnnnnnnnnnnnnnnnnnnnnnnnnnnnnnnnnnnnnnnnnnnnnnnnnnnnnnnnnnnnnnnnnnnnnnnnnnnnnnnnnnnnnnnnnnnnnnnnnnnnnnnnnnnnnnnnnnnnnnnnnnnnnnnnnnnnnnnnnnnnnnnnnnnnnnnnnnnnnnnnnnnnnnnnnnnnnnnnnnnnnnnnnnnnnnnnnnnnnnnnnnnnnnnnnnnnnnnnnnnnnnnnnnnnnnnnnnnnnnnnnnnnnnnnnnnnnnnnnnnnnnnnnnnnnnnnnnnnnnnnnnnnnnnnnnnnnnnnnnnnnnnnnnnnnnnnnnnnnnnnnnnnnnnnnnnnnnnnnnnnnnnnnnnnnnnnnnnnnnnnnnnnnnnnnnnnnnnnnnnnnnnnnnnnnnnnnnnnnnnnnnnnnnnnnnnnnnnnnnnnnnnnnnnnnnnnnnnnnnnnnnnnnnnnnnnnnnnnnnnnnnnnnnnnnnnnnnnnnnnnnnnnnnnnnnnnnnnnnnnnnnnnnnnnnnnnnnnnnnnnnnnnnnnnnnnnnnnnnnnnnnnnnnnnnnnnnnnnnnnnnnnnnnnnnnnnnnnnnnnnnnnnnnnnnnnnnnnnnnnnnnnnnnnnnnnnnnnnnnnnnnnnnnnnnnnnnnnnnnnnnnnnnnnnnnnnnnnnnnnnnnnnnnnnnnnnnnnnnnnnnnnnnnnnnnnnnnnnnnnnnnnnnnnnnnnnnnnnnnnnnnnnnnnnnnnnnnnnnnnnnnnnnnnnnnnnnnnnnnnnnnnnnnnnnnnnnnnnnnnnnnnnnnnnnnnnnnnnnnnnnnnnnnnnnnnnnnnnnnnnnnnnnnnnnnnnnnnnnnnnnnnnnnnnnnnnnnnnnnnnnnnnnnnnnnnnnnnnnnnnnnnnnnnnnnnnnnnnnnnnnnnnnnnnnnnnnnnnnnnnnnnnnnnnnnnnnnnnnnnnnnnnnnnnnnnnnnnnnnnnnnnnnnnnnnnnnnnnnnnnnnnnnnnnnnnnnnnnnnnnnnnnnnnnnnnnnnnnnnnnnnnnnnnnnnnnnnnnnnnnnnnnnnnnnnnnnnnnnnnnnnnnnnnnnnnnnnnnnnnnnnnnnnnnnnnnnnnnnnnnnnnnnnnnnnnnnnnnnnnnnnnnnnnnnnnnnnnnnnnnnnnnnnnnnnnnnnnnnnnnnnnnnnnnnnnnnnnnnnnnnnnnnnnnnnnnnnnnnnnnnnnnnnnnnnnnnnnnnnnnnnnnnnnnnnnnnnnnnnnnnnnnnnnnnnnnnnnnnnnnnnnnnnnnnnnnnnnnnnnnnnnnnnnnnnnnnnnnnnnnnnnnnnnnnnnnnnnnnnnnnnnnnnnnnnnnnnnnnnnnnnnnnnnnnnnnnnnnnnnnnnnnnnnnnnnnnnnnnnnnnnnnnnnnnnnnnnnnnnnnnnnnnnnnnnnnnnnnnnnnnnnnnnnnnnnnnnnnnnnnnnnnnnnnnnnnnnnnnnnnnnnnnnnnnnnnnnnnnnnnnnnnnnnnnnnnnnnnnnnnnnnnnnnnnnnnnnnnnnnnnnnnnnnnnnnnnnnnnnnnnnnnnnnnnnnnnnnnnnnnnnnnnnnnnnnnnnnnnnnnnnnnnnnnnnnnnnnnnnnnnnnnnnnnnnnnnnnnnnnnnnnnnnnnnnnnnnnnnnnnnnnnnnnnnnnnnnnnnnnnnnnnnnnnnnnnnnnnnnnnnnnnnnnnnnnnnnnnnnnnnnnnnnnnnnnnnnnnnnnnnnnnnnnnnnnnnnnnnnnnnnnnnnnnnnnnnnnnnnnnnnnnnnnnnnnnnnnnnnnnnnnnnnnnnnnnnnnnnnnnnnnnnnnnnnnnnnnnnnnnnnnnnnnnnnnnnnnnnnnnnnnnnnnnnnnnnnnnnnnnnnnnnnnnnnnnnnnnnnnnnnnnnnnnnnnnnnnnnnnnnnnnnnnnnnnnnnnnnnnnnnnnnnnnnnnnnnnnnnnnnnnnnnnnnnnnnnnnnnnnnnnnnnnnnnnnnnnnnnnnnnnnnnnnnnnnnnnnnnnnnnnnnnnnnnnnnnnnnnnnnnnnnnnnnnnnnnnnnnnnnnnnnnnnnnnnnnnnnnnnnnnnnnnnnnnnnnnnnnnnnnnnnnnnnnnnnnnnnnnnnnnnnnnnnnnnnnnnnnnnnnnnnnnnnnnnnnnnnnnnnnnnnnnnnnnnnnnnnnnnnnnnnnnnnnnnnnnnnnnnnnnnnnnnnnnnnnnnnnnnnnnnnnnnnnnnnnnnnnnnnnnnnnnnnnnnnnnnnnnnnnnnnnnnnnnnnnnnnnnnnnnnnnnnnnnnnnnnnnnnnnnnnnnnnnnnnnnnnnnnnnnnnnnnnnnnnnnnnnnnnnnnnnnnnnnnnnnnnnnnnnnnnnnnnnnnnnnnnnnnnnnnnnnnnnnnnnnnnnnnnnnnnnnnnnnnnnnnnnnnnnnnnnnnnnnnnnnnnnnnnnnnnnnnnnnnnnnnnnnnnnnnnnnnnnnnnnnnnnnnnnnnnnnnnnnnnnnnnnnnnnnnnnnnnnnnnnnnnnnnnnnnnnnnnnnnnnnnnnnnnnnnnnnnnnnnnnnnnnnnnnnnnnnnnnnnnnnnnnnnnnnnnnnnnnnnnnnnnnnnnnnnnnnnnnnnnnnnnnnnnnnnnnnnnnnnnnnnnnnnnnnnnnnnnnnnnnnnnnnnnnnnnnnnnnnnnnnnnnnnnnnnnnnnnnnnnnnnnnnnnnnnnnnnnnnnnnnnnnnnnnnnnnnnnnnnnnnnnnnnnnnnnnnnnnnnnnnnnnnnnnnnnnnnnnnnnnnnnnnnnnnnnnnnnnnnnnnnnnnnnnnnnnnnnnnnnnnnnnnnnnnnnnnnnnnnnnnnnnnnnnnnnnnnnnnnnnnnnnnnnnnnnnnnnnnnnnnnnnnnnnnnnnnnnnnnnnnnnnnnnnnnnnnnnnnnnnnnnnnnnnnnnnnnnnnnnnnnnnnnnnnnnnnnnnnnnnnnnnnnnnnnnnnnnnnnnnnnnnnnnnnnnnnnnnnnnnnnnnnnnnnnnnnnnnnnnnnnnnnnnnnnnnnnnnnnnnnnnnnnnnnnnnnnnnnnnnnnnnnnnnnnnnnnnnnnnnnnnnnnnnnnnnnnnnnnnnnnnnnnnnnnnnnnnnnnnnnnnnnnnnnnnnnnnnnnnnnnnnnnnnnnnnnnnnnnnnnnnnnnnnnnnnnnnnnnnnnnnnnnnnnnnnnnnnnnnnnnnnnnnnnnnnnnnnnnnnnnnnnnnnnnnnnnnnnnnnnnnnnnnnnnnnnnnnnnnnnnnnnnnnnnnnnnnnnnnnnnnnnnnnnnnnnnnnnnnnnnnnnnnnnnnnnnnnnnnnnnnnnnnnnnnnnnnnnnnnnnnnnnnnnnnnnnnnnnnnnnnnnnnnnnnnnnnnnnnnnnnnnnnnnnnnnnnnnnnnnnnnnnnnnnnnnnnnnnnnnnnnnnnnnnnnnnnnnnnnnnnnnnnnnnnnnnnnnnnnnnnnnnnnnnnnnnnnnnnnnnnnnnnnnnnnnnnnnnnnnnnnnnnnnnnnnnnnnnnnnnnnnnnnnnnnnnnnnnnnnnnnnnnnnnnnnnnnnnnnnnnnnnnnnnnnnnnnnnnnnnnnnnnnnnnnnnnnnnnnnnnnnnnnnnnnnnnnnnnnnnnnnnnnnnnnnnnnnnnnnnnnnnnnnnnnnnnnnnnnnnnnnnnnnnnnnnnnnnnnnnnnnnnnnnnnnnnnnnnnnnnnnnnnnnnnnnnnnnnnnnnnnnnnnnnnnnnnnnnnnnnnnnnnnnnnnnnnnnnnnnnnnnnnnnnnnnnnnnnnnnnnnnnnnnnnnnnnnnnnnnnnnnnnnnnnnnnnnnnnnnnnnnnnnnnnnnnnnnnnnnnnnnnnnnnnnnnnnnnnnnnnnnnnnnnnnnnnnnnnnnnnnnnnnnnnnnnnnnnnnnnnnnnnnnnnnnnnnnnnnnnnnnnnnnnnnnnnnnnnnnnnnnnnnnnnnnnnnnnnnnnnnnnnnnnnnnnnnnnnnnnnnnnnnnnnnnnnnnnnnnnnnnnnnnnnnnnnnnnnnnnnnnnnnnnnnnnnnnnnnnnnnnnnnnnnnnnnnnnnnnnnnnnnnnnnnnnnnnnnnnnnnnnnnnnnnnnnnnnnnnnnnnnnnnnnnnnnnnnnnnnnnnnnnnnnnnnnnnnnnnnnnnnnnnnnnnnnnnnnnnnnnnnnnnnnnnnnnnnnnnnnnnnnnnnnnnnnnnnnnnnnnnnnnnnnnnnnnnnnnnnnnnnnnnnnnnnnnnnnnnnnnnnnnnnnnnnnnnnnnnnnnnnnnnnnnnnnnnnnnnnnnnnnnnnnnnnnnnnnnnnnnnnnnnnnnnnnnnnnnnnnnnnnnnnnnnnnnnnnnnnnnnnnnnnnnnnnnnnnnnnnnnnnnnnnnnnnnnnnnnnnnnnnnnnnnnnnnnnnnnnnnnnnnnnnnnnnnnnnnnnnnnnnnnnnnnnnnnnnnnnnnnnnnnnnnnnnnnnnnnnnnnnnnnnnnnnnnnnnnnnnnnnnnnnnnnnnnnnnnnnnnnnnnnnnnnnnnnnnnnnnnnnnnnnnnnnnnnnnnnnnnnnnnnnnnnnnnnnnnnnnnnnnnnnnnnnnnnnnnnnnnnnnnnnnnnnnnnnnnnnnnnnnnnnnnnnnnnnnnnnnnnnnnnnnnnnnnnnnnnnnnnnnnnnnnnnnnnnnnnnnnnnnnnnnnnnnnnnnnnnnnnnnnnnnnnnnnnnnnnnnnnnnnnnnnnnnnnnnnnnnnnnnnnnnnnnnnnnnnnnnnnnnnnnnnnnnnnnnnnnnnnnnnnnnnnnnnnnnnnnnnnnnnnnnnnnnnnnnnnnnnnnnnnnnnnnnnnnnnnnnnnnnnnnnnnnnnnnnnnnnnnnnnnnnnnnnnnnnnnnnnnnnnnnnnnnnnnnnnnnnnnnnnnnnnnnnnnnnnnnnnnnnnnnnnnnnnnnnnnnnnnnnnnnnnnnnnnnnnnnnnnnnnnnnnnnnnnnnnnnnnnnnnnnnnnnnnnnnnnnnnnnnnnnnnnnnnnnnnnnnnnnnnnnnnnnnnnnnnnnnnnnnnnnnnnnnnnnnnnnnnnnnnnnnnnnnnnnnnnnnnnnnnnnnnnnnnnnnnnnnnnnnnnnnnnnnnnnnnnnnnnnnnnnnnnnnnnnnnnnnnnnnnnnnnnnnnnnnnnnnnnnnnnnnnnnnnnnnnnnnnnnnnnnnnnnnnnnnnnnnnnnnnnnnnnnnnnnnnnnnnnnnnnnnnnnnnnnnnnnnnnnnnnnnnnnnnnnnnnnnnnnnnnnnnnnnnnnnnnnnnnnnnnnnnnnnnnnnnnnnnnnnnnnnnnnnnnnnnnnnnnnnnnnnnnnnnnnnnnnnnnnnnnnnnnnnnnnnnnnnnnnnnnnnnnnnnnnnnnnnnnnnnnnnnnnnnnnnnnnnnnnnnnnnnnnnnnnnnnnnnnnnnnnnnnnnnnnnnnnnnnnnnnnnnnnnnnnnnnnnnnnnnnnnnnnnnnnnnnnnnnnnnnnnnnnnnnnnnnnnnnnnnnnnnnnnnnnnnnnnnnnnnnnnnnnnnnnnnnnnnnnnnnnnnnnnnnnnnnnnnnnnnnnnnnnnnnnnnnnnnnnnnnnnnnnnnnnnnnnnnnnnnnnnnnnnnnnnnnnnnnnnnnnnnnnnnnnnnnnnnnnnnnnnnnnnnnnnnnnnnnnnnnnnnnnnnnnnnnnnnnnnnnnnnnnnnnnnnnnnnnnnnnnnnnnnnnnnnnnnnnnnnnnnnnnnnnnnnnnnnnnnnnnnnnnnnnnnnnnnnnnnnnnnnnnnnnnnnnnnnnnnnnnnnnnnnnnnnnnnnnnnnnnnnnnnnnnnnnnnnnnnnnnnnnnnnnnnnnnnnnnnnnnnnnnnnnnnnnnnnnnnnnnnnnnnnnnnnnnnnnnnnnnnnnnnnnnnnnnnnnnnnnnnnnnnnnnnnnnnnnnnnnnnnnnnnnnnnnnnnnnnnnnnnnnnnnnnnnnnnnnnnnnnnnnnnnnnnnnnnnnnnnnnnnnnnnnnnnnnnnnnnnnnnnnnnnnnnnnnnnnnnnnnnnnnnnnnnnnnnnnnnnnnnnnnnnnnnnnnnnnnnnnnnnnnnnnnnnnnnnnnnnnnnnnnnnnnnnnnnnnnnnnnnnnnnnnnnnnnnnnnnnnnnnnnnnnnnnnnnnnnnnnnnnnnnnnnnnnnnnnnnnnnnnnnnnnnnnnnnnnnnnnnnnnnnnnnnnnnnnnnnnnnnnnnnnnnnnnnnnnnnnnnnnnnnnnnnnnnnnnnnnnnnnnnnnnnnnnnnnnnnnnnnnnnnnnnnnnnnnnnnnnnnnnnnnnnnnnnnnnnnnnnnnnnnnnnnnnnnnnnnnnnnnnnnnnnnnnnnnnnnnnnnnnnnnnnnnnnnnnnnnnnnnnnnnnnnnnnnnnnnnnnnnnnnnnnnnnnnnnnnnnnnnnnnnnnnnnnnnnnnnnnnnnnnnnnnnnnnnnnnnnnnnnnnnnnnnnnnnnnnnnnnnnnnnnnnnnnnnnnnnnnnnnnnnnnnnnnnnnnnnnnnnnnnnnnnnnnnnnnnnnnnnnnnnnnnnnnnnnnnnnnnnnnnnnnnnnnnnnnnnnnnnnnnnnnnnnnnnnnnnnnnnnnnnnnnnnnnnnnnnnnnnnnnnnnnnnnnnnnnnnnnnnnnnnnnnnnnnnnnnnnnnnnnnnnnnnnnnnnnnnnnnnnnnnnnnnnnnnnnnnnnnnnnnnnnnnnnnnnnnnnnnnnnnnnnnnnnnnnnnnnnnnnnnnnnnnnnnnnnnnnnnnnnnnnnnnnnnnnnnnnnnnnnnnnnnnnnnnnnnnnnnnnnnnnnnnnnnnnnnnnnnnnnnnnnnnnnnnnnnnnnnnnnnnnnnnnnnnnnnnnnnnnnnnnnnnnnnnnnnnnnnnnnnnnnnnnnnnnnnnnnnnnnnnnnnnnnnnnnnnnnnnnnnnnnnnnnnnnnnnnnnnnnnnnnnnnnnnnnnnnnnnnnnnnnnnnnnnnnnnnnnnnnnnnnnnnnnnnnnnnnnnnnnnnnnnnnnnnnnnnnnnnnnnnnnnnnnnnnnnnnnnnnnnnnnnnnnnnnnnnnnnnnnnnnnnnnnnnnnnnnnnnnnnnnnnnnnnnnnnnnnnnnnnnnnnnnnnnnnnnnnnnnnnnnnnnnnnnnnnnnnnnnnnnnnnnnnnnnnnnnnnnnnnnnnnnnnnnnnnnnnnnnnnnnnnnnnnnnnnnnnnnnnnnnnnnnnnnnnnnnnnnnnnnnnnnnnnnnnnnnnnnnnnnnnnnnnnnnnnnnnnnnnnnnnnnnnnnnnnnnnnnnnnnnnnnnnnnnnnnnnnnnnnnnnnnnnnnnnnnnnnnnnnnnnnnnnnnnnnnnnnnnnnnnnnnnnnnnnnnnnnnnnnnnnnnnnnnnnnnnnnnnnnnnnnnnnnnnnnnnnnnnnnnnnnnnnnnnnnnnnnnnnnnnnnnnnnnnnnnnnnnnnnnnnnnnnnnnnnnnnnnnnnnnnnnnnnnnnnnnnnnnnnnnnnnnnnnnnnnnnnnnnnnnnnnnnnnnnnnnnnnnnnnnnnnnnnnnnnnnnnnnnnnnnnnnnnnnnnnnnnnnnnnnnnnnnnnnnnnnnnnnnnnnnnnnnnnnnnnnnnnnnnnnnnnnnnnnnnnnnnnnnnnnnnnnnnnnnnnnnnnnnnnnnnnnnnnnnnnnnnnnnnnnnnnnnnnnnnnnnnnnnnnnnnnnnnnnnnnnnnnnnnnnnnnnnnnnnnnnnnnnnnnnnnnnnnnnnnnnnnnnnnnnnnnnnnnnnnnnnnnnnnnnnnnnnnnnnnnnnnnnnnnnnnnnnnnnnnnnnnnnnnnnnnnnnnnnnnnnnnnnnnnnnnnnnnnnnnnnnnnnnnnnnnnnnnnnnnnnnnnnnnnnnnnnnnnnnnnnnnnnnnnnnnnnnnnnnnnnnnnnnnnnnnnnnnnnnnnnnnnnnnnnnnnnnnnnnnnnnnnnnnnnnnnnnnnnnnnnnnnnnnnnnnnnnnnnnnnnnnnnnnnnnnnnnnnnnnnnnnnnnnnnnnnnnnnnnnnnnnnnnnnnnnnnnnnnnnnnnnnnnnnnnnnnnnnnnnnnnnnnnnnnnnnnnnnnnnnnnnnnnnnnnnnnnnnnnnnnnnnnnnnnnnnnnnnnnnnnnnnnnnnnnnnnnnnnnnnnnnnnnnnnnnnnnnnnnnnnnnnnnnnnnnnnnnnnnnnnnnnnnnnnnnnnnnnnnnnnnnnnnnnnnnnnnnnnnnnnnnnnnnnnnnnnnnnnnnnnnnnnnnnnnnnnnnnnnnnnnnnnnnnnnnnnnnnnnnnnnnnnnnnnnnnnnnnnnnnnnnnnnnnnnnnnnnnnnnnnnnnnnnnnnnnnnnnnnnnnnnnnnnnnnnnnnnnnnnnnnnnnnnnnnnnnnnnnnnnnnnnnnnnnnnnnnnnnnnnnnnnnnnnnnnnnnnnnnnnnnnnnnnnnnnnnnnnnnnnnnnnnnnnnnnnnnnnnnnnnnnnnnnnnnnnnnnnnnnnnnnnnnnnnnnnnnnnnnnnnnnnnnnnnnnnnnnnnnnnnnnnnnnnnnnnnnnnnnnnnnnnnnnnnnnnnnnnnnnnnnnnnnnnnnnnnnnnnnnnnnnnnnnnnnnnnnnnnnnnnnnnnnnnnnnnnnnnnnnnnnnnnnnnnnnnnnnnnnnnnnnnnnnnnnnnnnnnnnnnnnnnnnnnnnnnnnnnnnnnnnnnnnnnnnnnnnnnnnnnnnnnnnnnnnnnnnnnnnnnnnnnnnnnnnnnnnnnnnnnnnnnnnnnnnnnnnnnnnnnnnnnnnnnnnnnnnnnnnnnnnnnnnnnnnnnnnnnnnnnnnnnnnnnnnnnnnnnnnnnnnnnnnnnnnnnnnnnnnnnnnnnnnnnnnnnnnnnnnnnnnnnnnnnnnnnnnnnnnnnnnnnnnnnnnnnnnnnnnnnnnnnnnnnnnnnnnnnnnnnnnnnnnnnnnnnnnnnnnnnnnnnnnnnnnnnnnnnnnnnnnnnnnnnnnnnnnnnnnnnnnnnnnnnnnnnnnnnnnnnnnnnnnnnnnnnnnnnnnnnnnnnnnnnnnnnnnnnnnnnnnnnnnnnnnnnnnnnnnnnnnnnnnnnnnnnnnnnnnnnnnnnnnnnnnnnnnnnnnnnnnnnnnnnnnnnnnnnnnnnnnnnnnnnnnnnnnnnnnnnnnnnnnnnnnnnnnnnnnnnnnnnnnnnnnnnnnnnnnnnnnnnnnnnnnnnnnnnnnnnnnnnnnnnnnnnnnnnnnnnnnnnnnnnnnnnnnnnnnnnnnnnnnnnnnnnnnnnnnnnnnnnnnnnnnnnnnnnnnnnnnnnnnnnnnnnnnnnnnnnnnnnnnnnnnnnnnnnnnnnnnnnnnnnnnnnnnnnnnnnnnnnnnnnnnnnnnnnnnnnnnnnnnnnnnnnnnnnnnnnnnnnnnnnnnnnnnnnnnnnnnnnnnnnnnnnnnnnnnnnnnnnnnnnnnnnnnnnnnnnnnnnnnnnnnnnnnnnnnnnnnnnnnnnnnnnnnnnnnnnnnnnnnnnnnnnnnnnnnnnnnnnnnnnnnnnnnnnnnnnnnnnnnnnnnnnnnnnnnnnnnnnnnnnnnnnnnnnnnnnnnnnnnnnnnnnnnnnnnnnnnnnnnnnnnnnnnnnnnnnnnnnnnnnnnnnnnnnnnnnnnnnnnnnnnnnnnnnnnnnnnnnnnnnnnnnnnnnnnnnnnnnnnnnnnnnnnnnnnnnnnnnnnnnnnnnnnnnnnnnnnnnnnnnnnnnnnnnnnnnnnnnnnnnnnnnnnnnnnnnnnnnnnnnnnnnnnnnnnnnnnnnnnnnnnnnnnnnnnnnnnnnnnnnnnnnnnnnnnnnnnnnnnnnnnnnnnnnnnnnnnnnnnnnnnnnnnnnnnnnnnnnnnnnnnnnnnnnnnnnnnnnnnnnnnnnnnnnnnnnnnnnnnnnnnnnnnnnnnnnnnnnnnnnnnnnnnnnnnnnnnnnnnnnnnnnnnnnnnnnnnnnnnnnnnnnnnnnnnnnnnnnnnnnnnnnnnnnnnnnnnnnnnnnnnnnnnnnnnnnnnnnnnnnnnnnnnnnnnnnnnnnnnnnnnnnnnnnnnnnnnnnnnnnnnnnnnnnnnnnnnnnnnnnnnnnnnnnnnnnnnnnnnnnnnnnnnnnnnnnnnnnnnnnnnnnnnnnnnnnnnnnnnnnnnnnnnnnnnnnnnnnnnnnnnnnnnnnnnnnnnnnnnnnnnnnnnnnnnnnnnnnnnnnnnnnnnnnnnnnnnnnnnnnnnnnnnnnnnnnnnnnnnnnnnnnnnnnnnnnnnnnnnnnnnnnnnnnnnnnnnnnnnnnnnnnnnnnnnnnnnnnnnnnnnnnnnnnnnnnnnnnnnnnnnnnnnnnnnnnnnnnnnnnnnnnnnnnnnnnnnnnnnnnnnnnnnnnnnnnnnnnnnnnnnnnnnnnnnnnnnnnnnnnnnnnnnnnnnnnnnnnnnnnnnnnnnnnnnnnnnnnnnnnnnnnnnnnnnnnnnnnnnnnnnnnnnnnnnnnnnnnnnnnnnnnnnnnnnnnnnnnnnnnnnnnnnnnnnnnnnnnnnnnnnnnnnnnnnnnnnnnnnnnnnnnnnnnnnnnnnnnnnnnnnnnnnnnnnnnnnnnnnnnnnnnnnnnnnnnnnnnnnnnnnnnnnnnnnnnnnnnnnnnnnnnnnnnnnnnnnnnnnnnnnnnnnnnnnnnnnnnnnnnnnnnnnnnnnnnnnnnnnnnnnnnnnnnnnnnnnnnnnnnnnnnnnnnnnnnnnnnnnnnnnnnnnnnnnnnnnnnnnnnnnnnnnnnnnnnnnnnnnnnnnnnnnnnnnnnnnnnnnnnnnnnnnnnnnnnnnnnnnnnnnnnnnnnnnnnnnnnnnnnnnnnnnnnnnnnnnnnnnnnnnnnnnnnnnnnnnnnnnnnnnnnnnnnnnnnnnnnnnnnnnnnnnnnnnnnnnnnnnnnnnnnnnnnnnnnnnnnnnnnnnnnnnnnnnnnnnnnnnnnnnnnnnnnnnnnnnnnnnnnnnnnnnnnnnnnnnnnnnnnnnnnnnnnnnnnnnnnnnnnnnnnnnnnnnnnnnnnnnnnnnnnnnnnnnnnnnnnnnnnnnnnnnnnnnnnnnnnnnnnnnnnnnnnnnnnnnnnnnnnnnnnnnnnnnnnnnnnnnnnnnnnnnnnnnnnnnnnnnnnnnnnnnnnnnnnnnnnnnnnnnnnnnnnnnnnnnnnnnnnnnnnnnnnnnnnnnnnnnnnnnnnnnnnnnnnnnnnnnnnnnnnnnnnnnnnnnnnnnnnnnnnnnnnnnnnnnnnnnnnnnnnnnnnnnnnnnnnnnnnnnnnnnnnnnnnnnnnnnnnnnnnnnnnnnnnnnnnnnnnnnnnnnnnnnnnnnnnnnnnnnnnnnnnnnnnnnnnnnnnnnnnnnnnnnnnnnnnnnnnnnnnnnnnnnnnnnnnnnnnnnnnnnnnnnnnnnnnnnnnnnnnnnnnnnnnnnnnnnnnnnnnnnnnnnnnnnnnnnnnnnnnnnnnnnnnnnnnnnnnnnnnnnnnnnnnnnnnnnnnnnnnnnnnnnnnnnnnnnnnnnnnnnnnnnnnnnnnnnnnnnnnnnnnnnnnnnnnnnnnnnnnnnnnnnnnnnnnnnnnnnnnnnnnnnnnnnnnnnnnnnnnnnnnnnnnnnnnnnnnnnnnnnnnnnnnnnnnnnnnnnnnnnnnnnnnnnnnnnnnnnnnnnnnnnnnnnnnnnnnnnnnnnnnnnnnnnnnnnnnnnnnnnnnnnnnnnnnnnnnnnnnnnnnnnnnnnnnnnnnnnnnnnnnnnnnnnnnnnnnnnnnnnnnnnnnnnnnnnnnnnnnnnnnnnnnnnnnnnnnnnnnnnnnnnnnnnnnnnnnnnnnnnnnnnnnnnnnnnnnnnnnnnnnnnnnnnnnnnnnnnnnnnnnnnnnnnnnnnnnnnnnnnnnnnnnnnnnnnnnnnnnnnnnnnnnnnnnnnnnnnnnnnnnnnnnnnnnnnnnnnnnnnnnnnnnnnnnnnnnnnnnnnnnnnnnnnnnnnnnnnnnnnnnnnnnnnnnnnnnnnnnnnnnnnnnnnnnnnnnnnnnnnnnnnnnnnnnnnnnnnnnnnnnnnnnnnnnnnnnnnnnnnnnnnnnnnnnnnnnnnnnnnnnnnnnnnnnnnnnnnnnnnnnnnnnnnnnnnnnnnnnnnnnnnnnnnnnnnnnnnnnnnnnnnnnnnnnnnnnnnnnnnnnnnnnnnnnnnnnnnnnnnnnnnnnnnnnnnnnnnnnnnnnnnnnnnnnnnnnnnnnnnnnnnnnnnnnnnnnnnnnnnnnnnnnnnnnnnnnnnnnnnnnnnnnnnnnnnnnnnnnnnnnnnnnnnnnnnnnnnnnnnnnnnnnnnnnnnnnnnnnnnnnnnnnnnnnnnnnnnnnnnnnnnnnnnnnnnnnnnnnnnnnnnnnnnnnnnnnnnnnnnnnnnnnnnnnnnnnnnnnnnnnnnnnnnnnnnnnnnnnnnnnnnnnnnnnnnnnnnnnnnnnnnnnnnnnnnnnnnnnnnnnnnnnnnnnnnnnnnnnnnnnnnnnnnnnnnnnnnnnnnnnnnnnnnnnnnnnnnnnnnnnnnnnnnnnnnnnnnnnnnnnnnnnnnnnnnnnnnnnnnnnnnnnnnnnnnnnnnnnnnnnnnnnnnnnnnnnnnnnnnnnnnnnnnnnnnnnnnnnnnnnnnnnnnnnnnnnnnnnnnnnnnnnnnnnnnnnnnnnnnnnnnnnnnnnnnnnnnnnnnnnnnnnnnnnnnnnnnnnnnnnnnnnnnnnnnnnnnnnnnnnnnnnnnnnnnnnnnnnnnnnnnnnnnnnnnnnnnnnnnnnnnnnnnnnnnnnnnnnnnnnnnnnnnnnnnnnnnnnnnnnnnnnnnnnnnnnnnnnnnnnnnnnnnnnnnnnnnnnnnnnnnnnnnnnnnnnnnnnnnnnnnnnnnnnnnnnnnnnnnnnnnnnnnnnnnnnnnnnnnnnnnnnnnnnnnnnnnnnnnnnnnnnnnnnnnnnnnnnnnnnnnnnnnnnnnnnnnnnnnnnnnnnnnnnnnnnnnnnnnnnnnnnnnnnnnnnnnnnnnnnnnnnnnnnnnnnnnnnnnnnnnnnnnnnnnnnnnnnnnnnnnnnnnnnnnnnnnnnnnnnnnnnnnnnnnnnnnnnnnnnnnnnnnnnnnnnnnnnnnnnnnnnnnnnnnnnnnnnnnnnnnnnnnnnnnnnnnnnnnnnnnnnnnnnnnnnnnnnnnnnnnnnnnnnnnnnnnnnnnnnnnnnnnnnnnnnnnnnnnnnnnnnnnnnnnnnnnnnnnnnnnnnnnnnnnnnnnnnnnnnnnnnnnnnnnnnnnnnnnnnnnnnnnnnnnnnnnnnnnnnnnnnnnnnnnnnnnnnnnnnnnnnnnnnnnnnnnnnnnnnnnnnnnnnnnnnnnnnnnnnnnnnnnnnnnnnnnnnnnnnnnnnnnnnnnnnnnnnnnnnnnnnnnnnnnnnnnnnnnnnnnnnnnnnnnnnnnnnnnnnnnnnnnnnnnnnnnnnnnnnnnnnnnnnnnnnnnnnnnnnnnnnnnnnnnnnnnnnnnnnnnnnnnnnnnnnnnnnnnnnnnnnnnnnnnnnnnnnnnnnnnnnnnnnnnnnnnnnnnnnnnnnnnnnnnnnnnnnnnnnnnnnnnnnnnnnnnnnnnnnnnnnnnnnnnnnnnnnnnnnnnnnnnnnnnnnnnnnnnnnnnnnnnnnnnnnnnnnnnnnnnnnnnnnnnnnnnnnnnnnnnnnnnnnnnnnnnnnnnnnnnnnnnnnnnnnnnnnnnnnnnnnnnnnnnnnnnnnnnnnnnnnnnnnnnnnnnnnnnnnnnnnnnnnnnnnnnnnnnnnnnnnnnnnnnnnnnnnnnnnnnnnnnnnnnnnnnnnnnnnnnnnnnnnnnnnnnnnnnnnnnnnnnnnnnnnnnnnnnnnnnnnnnnnnnnnnnnnnnnnnnnnnnnnnnnnnnnnnnnnnnnnnnnnnnnnnnnnnnnnnnnnnnnnnnnnnnnnnnnnnnnnnnnnnnnnnnnnnnnnnnnnnnnnnnnnnnnnnnnnnnnnnnnnnnnnnnnnnnnnnnnnnnnnnnnnnnnnnnnnnnnnnnnnnnnnnnnnnnnnnnnnnnnnnnnnnnnnnnnnnnnnnnnnnnnnnnnnnnnnnnnnnnnnnnnnnnnnnnnnnnnnnnnnnnnnnnnnnnnnnnnnnnnnnnnnnnnnnnnnnnnnnnnnnnnnnnnnnnnnnnnnnnnnnnnnnnnnnnnnnnnnnnnnnnnnnnnnnnnnnnnnnnnnnnnnnnnnnnnnnnnnnnnnnnnnnnnnnnnnnnnnnnnnnnnnnnnnnnnnnnnnnnnnnnnnnnnnnnnnnnnnnnnnnnnnnnnnnnnnnnnnnnnnnnnnnnnnnnnnnnnnnnnnnnnnnnnnnnnnnnnnnnnnnnnnnnnnnnnnnnnnnnnnnnnnnnnnnnnnnnnnnnnnnnnnnnnnnnnnnnnnnnnnnnnnnnnnnnnnnnnnnnnnnnnnnnnnnnnnnnnnnnnnnnnnnnnnnnnnnnnnnnnnnnnnnnnnnnnnnnnnnnnnnnnnnnnnnnnnnnnnnnnnnnnnnnnnnnnnnnnnnnnnnnnnnnnnnnnnnnnnnnnnnnnnnnnnnnnnnnnnnnnnnnnnnnnnnnnnnnnnnnnnnnnnnnnnnnnnnnnnnnnnnnnnnnnnnnnnnnnnnnnnnnnnnnnnnnnnnnnnnnnnnnnnnnnnnnnnnnnnnnnnnnnnnnnnnnnnnnnnnnnnnnnnnnnnnnnnnnnnnnnnnnnnnnnnnnnnnnnnnnnnnnnnnnnnnnnnnnnnnnnnnnnnnnnnnnnnnnnnnnnnnnnnnnnnnnnnnnnnnnnnnnnnnnnnnnnnnnnnnnnnnnnnnnnnnnnnnnnnnnnnnnnnnnnnnnnnnnnnnnnnnnnnnnnnnnnnnnnnnnnnnnnnnnnnnnnnnnnnnnnnnnnnnnnnnnnnnnnnnnnnnnnnnnnnnnnnnnnnnnnnnnnnnnnnnnnnnnnnnnnnnnnnnnnnnnnnnnnnnnnnnnnnnnnnnnnnnnnnnnnnnnnnnnnnnnnnnnnnnnnnnnnnnnnnnnnnnnnnnnnnnnnnnnnnnnnnnnnnnnnnnnnnnnnnnnnnnnnnnnnnnnnnnnnnnnnnnnnnnnnnnnnnnnnnnnnnnnnnnnnnnnnnnnnnnnnnnnnnnnnnnnnnnnnnnnnnnnnnnnnnnnnnnnnnnnnnnnnnnnnnnnnnnnnnnnnnnnnnnnnnnnnnnnnnnnnnnnnnnnnnnnnnnnnnnnnnnnnnnnnnnnnnnnnnnnnnnnnnnnnnnnnnnnnnnnnnnnnnnnnnnnnnnnnnnnnnnnnnnnnnnnnnnnnnnnnnnnnnnnnnnnnnnnnnnnnnnnnnnnnnnnnnnnnnnnnnnnnnnnnnnnnnnnnnnnnnnnnnnnnnnnnnnnnnnnnnnnnnnnnnnnnnnnnnnnnnnnnnnnnnnnnnnnnnnnnnnnnnnnnnnnnnnnnnnnnnnnnnnnnnnnnnnnnnnnnnnnnnnnnnnnnnnnnnnnnnnnnnnnnnnnnnnnnnnnnnnnnnnnnnnnnnnnnnnnnnnnnnnnnnnnnnnnnnnnnnnnnnnnnnnnnnnnnnnnnnnnnnnnnnnnnnnnnnnnnnnnnnnnnnnnnnnnnnnnnnnnnnnnnnnnnnnnnnnnnnnnnnnnnnnnnnnnnnnnnnnnnnnnnnnnnnnnnnnnnnnnnnnnnnnnnnnnnnnnnnnnnnnnnnnnnnnnnnnnnnnnnnnnnnnnnnnnnnnnnnnnnnnnnnnnnnnnnnnnnnnnnnnnnnnnnnnnnnnnnnnnnnnnnnnnnnnnnnnnnnnnnnnnnnnnnnnnnnnnnnnnnnnnnnnnnnnnnnnnnnnnnnnnnnnnnnnnnnnnnnnnnnnnnnnnnnnnnnnnnnnnnnnnnnnnnnnnnnnnnnnnnnnnnnnnnnnnnnnnnnnnnnnnnnnnnnnnnnnnnnnnnnnnnnnnnnnnnnnnnnnnnnnnnnnnnnnnnnnnnnnnnnnnnnnnnnnnnnnnnnnnnnnnnnnnnnnnnnnnnnnnnnnnnnnnnnnnnnnnnnnnnnnnnnnnnnnnnnnnnnnnnnnnnnnnnnnnnnnnnnnnnnnnnnnnnnnnnnnnnnnnnnnnnnnnnnnnnnnnnnnnnnnnnnnnnnnnnnnnnnnnnnnnnnnnnnnnnnnnnnnnnnnnnnnnnnnnnnnnnnnnnnnnnnnnnnnnnnnnnnnnnnnnnnnnnnnnnnnnnnnnnnnnnnnnnnnnnnnnnnnnnnnnnnnnnnnnnnnnnnnnnnnnnnnnnnnnnnnnnnnnnnnnnnnnnnnnnnnnnnnnnnnnnnnnnnnnnnnnnnnnnnnnnnnnnnnnnnnnnnnnnnnnnnnnnnnnnnnnnnnnnnnnnnnnnnnnnnnnnnnnnnnnnnnnnnnnnnnnnnnnnnnnnnnnnnnnnnnnnnnnnnnnnnnnnnnnnnnnnnnnnnnnnnnnnnnnnnnnnnnnnnnnnnnnnnnnnnnnnnnnnnnnnnnnnnnnnnnnnnnnnnnnnnnnnnnnnnnnnnnnnnnnnnnnnnnnnnnnnnnnnnnnnnnnnnnnnnnnnnnnnnnnnnnnnnnnnnnnnnnnnnnnnnnnnnnnnnnnnnnnnnnnnnnnnnnnnnnnnnnnnnnnnnnnnnnnnnnnnnnnnnnnnnnnnnnnnnnnnnnnnnnnnnnnnnnnnnnnnnnnnnnnnnnnnnnnnnnnnnnnnnnnnnnnnnnnnnnnnnnnnnnnnnnnnnnnnnnnnnnnnnnnnnnnnnnnnnnnnnnnnnnnnnnnnnnnnnnnnnnnnnnnnnnnnnnnnnnnnnnnnnnnnnnnnnnnnnnnnnnnnnnnnnnnnnnnnnnnnnnnnnnnnnnnnnnnnnnnnnnnnnnnnnnnnnnnnnnnnnnnnnnnnnnnnnnnnnnnnnnnnnnnnnnnnnnnnnnnnnnnnnnnnnnnnnnnnnnnnnnnnnnnnnnnnnnnnnnnnnnnnnnnnnnnnnnnnnnnnnnnnnnnnnnnnnnnnnnnnnnnnnnnnnnnnnnnnnnnnnnnnnnnnnnnnnnnnnnnnnnnnnnnnnnnnnnnnnnnnnnnnnnnnnnnnnnnnnnnnnnnnnnnnnnnnnnnnnnnnnnnnnnnnnnnnnnnnnnnnnnnnnnnnnnnnnnnnnnnnnnnnnnnnnnnnnnnnnnnnnnnnnnnnnnnnnnnnnnnnnnnnnnnnnnnnnnnnnnnnnnnnnnnnnnnnnnnnnnnnnnnnnnnnnnnnnnnnnnnnnnnnnnnnnnnnnnnnnnnnnnnnnnnnnnnnnnnnnnnnnnnnnnnnnnnnnnnnnnnnnnnnnnnnnnnnnnnnnnnnnnnnnnnnnnnnnnnnnnnnnnnnnnnnnnnnnnnnnnnnnnnnnnnnnnnnnnnnnnnnnnnnnnnnnnnnnnnnnnnnnnnnnnnnnnnnnnnnnnnnnnnnnnnnnnnnnnnnnnnnnnnnnnnnnnnnnnnnnnnnnnnnnnnnnnnnnnnnnnnnnnnnnnnnnnnnnnnnnnnnnnnnnnnnnnnnnnnnnnnnnnnnnnnnnnnnnnnnnnnnnnnnnnnnnnnnnnnnnnnnnnnnnnnnnnnnnnnnnnnnnnnnnnnnnnnnnnnnnnnnnnnnnnnnnnnnnnnnnnnnnnnnnnnnnnnnnnnnnnnnnnnnnnnnnnnnnnnnnnnnnnnnnnnnnnnnnnnnnnnnnnnnnnnnnnnnnnnnnnnnnnnnnnnnnnnnnnnnnnnnnnnnnnnnnnnnnnnnnnnnnnnnnnnnnnnnnnnnnnnnnnnnnnnnnnnnnnnnnnnnnnnnnnnnnnnnnnnnnnnnnnnnnnnnnnnnnnnnnnnnnnnnnnnnnnnnnnnnnnnnnnnnnnnnnnnnnnnnnnnnnnnnnnnnnnnnnnnnnnnnnnnnnnnnnnnnnnnnnnnnnnnnnnnnnnnnnnnnnnnnnnnnnnnnnnnnnnnnnnnnnnnnnnnnnnnnnnnnnnnnnnnnnnnnnnnnnnnnnnnnnnnnnnnnnnnnnnnnnnnnnnnnnnnnnnnnnnnnnnnnnnnnnnnnnnnnnnnnnnnnnnnnnnnnnnnnnnnnnnnnnnnnnnnnnnnnnnnnnnnnnnnnnnnnnnnnnnnnnnnnnnnnnnnnnnnnnnnnnnnnnnnnnnnnnnnnnnnnnnnnnnnnnnnnnnnnnnnnnnnnnnnnnnnnnnnnnnnnnnnnnnnnnnnnnnnnnnnnnnnnnnnnnnnnnnnnnnnnnnnnnnnnnnnnnnnnnnnnnnnnnnnnnnnnnnnnnnnnnnnnnnnnnnnnnnnnnnnnnnnnnnnnnnnnnnnnnnnnnnnnnnnnnnnnnnnnnnnnnnnnnnnnnnnnnnnnnnnnnnnnnnnnnnnnnnnnnnnnnnnnnnnnnnnnnnnnnnnnnnnnnnnnnnnnnnnnnnnnnnnnnnnnnnnnnnnnnnnnnnnnnnnnnnnnnnnnnnnnnnnnnnnnnnnnnnnnnnnnnnnnnnnnnnnnnnnnnnnnnnnnnnnnnnnnnnnnnnnnnnnnnnnnnnnnnnnnnnnnnnnnnnnnnnnnnnnnnnnnnnnnnnnnnnnnnnnnnnnnnnnnnnnnnnnnnnnnnnnnnnnnnnnnnnnnnnnnnnnnnnnnnnnnnnnnnnnnnnnnnnnnnnnnnnnnnnnnnnnnnnnnnnnnnnnnnnnnnnnnnnnnnnnnnnnnnnnnnnnnnnnnnnnnnnnnnnnnnnnnnnnnnnnnnnnnnnnnnnnnnnnnnnnnnnnnnnnnnnnnnnnnnnnnnnnnnnnnnnnnnnnnnnnnnnnnnnnnnnnnnnnnnnnnnnnnnnnnnnnnnnnnnnnnnnnnnnnnnnnnnnnnnnnnnnnnnnnnnnnnnnnnnnnnnnnnnnnnnnnnnnnnnnnnnnnnnnnnnnnnnnnnnnnnnnnnnnnnnnnnnnnnnnnnnnnnnnnnnnnnnnnnnnnnnnnnnnnnnnnnnnnnnnnnnnnnnnnnnnnnnnnnnnnnnnnnnnnnnnnnnnnnnnnnnnnnnnnnnnnnnnnnnnnnnnnnnnnnnnnnnnnnnnnnnnnnnnnnnnnnnnnnnnnnnnnnnnnnnnnnnnnnnnnnnnnnnnnnnnnnnnnnnnnnnnnnnnnnnnnnnnnnnnnnnnnnnnnnnnnnnnnnnnnnnnnnnnnnnnnnnnnnnnnnnnnnnnnnnnnnnnnnnnnnnnnnnnnnnnnnnnnnnnnnnnnnnnnnnnnnnnnnnnnnnnnnnnnnnnnnnnnnnnnnnnnnnnnnnnnnnnnnnnnnnnnnnnnnnnnnnnnnnnnnnnnnnnnnnnnnnnnnnnnnnnnnnnnnnnnnnnnnnnnnnnnnnnnnnnnnnnnnnnnnnnnnnnnnnnnnnnnnnnnnnnnnnnnnnnnnnnnnnnnnnnnnnnnnnnnnnnnnnnnnnnnnnnnnnnnnnnnnnnnnnnnnnnnnnnnnnnnnnnnnnnnnnnnnnnnnnnnnnnnnnnnnnnnnnnnnnnnnnnnnnnnnnnnnnnnnnnnnnnnnnnnnnnnnnnnnnnnnnnnnnnnnnnnnnnnnnnnnnnnnnnnnnnnnnnnnnnnnnnnnnnnnnnnnnnnnnnnnnnnnnnnnnnnnnnnnnnnnnnnnnnnnnnnnnnnnnnnnnnnnnnnnnnnnnnnnnnnnnnnnnnnnnnnnnnnnnnnnnnnnnnnnnnnnnnnnnnnnnnnnnnnnnnnnnnnnnnnnnnnnnnnnnnnnnnnnnnnnnnnnnnnnnnnnnnnnnnnnnnnnnnnnnnnnnnnnnnnnnnnnnnnnnnnnnnnnnnnnnnnnnnnnnnnnnnnnnnnnnnnnnnnnnnnnnnnnnnnnnnnnnnnnnnnnnnnnnnnnnnnnnnnnnnnnnnnnnnnnnnnnnnnnnnnnnnnnnnnnnnnnnnnnnnnnnnnnnnnnnnnnnnnnnnnnnnnnnnnnnnnnnnnnnnnnnnnnnnnnnnnnnnnnnnnnnnnnnnnnnnnnnnnnnnnnnnnnnnnnnnnnnnnnnnnnnnnnnnnnnnnnnnnnnnnnnnnnnnnnnnnnnnnnnnnnnnnnnnnnnnnnnnnnnnnnnnnnnnnnnnnnnnnnnnnnnnnnnnnnnnnnnnnnnnnnnnnnnnnnnnnnnnnnnnnnnnnnnnnnnnnnnnnnnnnnnnnnnnnnnnnnnnnnnnnnnnnnnnnnnnnnnnnnnnnnnnnnnnnnnnnnnnnnnnnnnnnnnnnnnnnnnnnnnnnnnnnnnnnnnnnnnnnnnnnnnnnnnnnnnnnnnnnnnnnnnnnnnnnnnnnnnnnnnnnnnnnnnnnnnnnnnnnnnnnnnnnnnnnnnnnnnnnnnnnnnnnnnnnnnnnnnnnnnnnnnnnnnnnnnnnnnnnnnnnnnnnnnnnnnnnnnnnnnnnnnnnnnnnnnnnnnnnnnnnnnnnnnnnnnnnnnnnnnnnnnnnnnnnnnnnnnnnnnnnnnnnnnnnnnnnnnnnnnnnnnnnnnnnnnnnnnnnnnnnnnnnnnnnnnnnnnnnnnnnnnnnnnnnnnnnnnnnnnnnnnnnnnnnnnnnnnnnnnnnnnnnnnnnnnnnnnnnnnnnnnnnnnnnnnnnnnnnnnnnnnnnnnnnnnnnnnnnnnnnnnnnnnnnnnnnnnnnnnnnnnnnnnnnnnnnnnnnnnnnnnnnnnnnnnnnnnnnnnnnnnnnnnnnnnnnnnnnnnnnnnnnnnnnnnnnnnnnnnnnnnnnnnnnnnnnnnnnnnnnnnnnnnnnnnnnnnnnnnnnnnnnnnnnnnnnnnnnnnnnnnnnnnnnnnnnnnnnnnnnnnnnnnnnnnnnnnnnnnnnnnnnnnnnnnnnnnnnnnnnnnnnnnnnnnnnnnnnnnnnnnnnnnnnnnnnnnnnnnnnnnnnnnnnnnnnnnnnnnnnnnnnnnnnnnnnnnnnnnnnnnnnnnnnnnnnnnnnnnnnnnnnnnnnnnnnnnnnnnnnnnnnnnnnnnnnnnnnnnnnnnnnnnnnnnnnnnnnnnnnnnnnnnnnnnnnnnnnnnnnnnnnnnnnnnnnnnnnnnnnnnnnnnnnnnnnnnnnnnnnnnnnnnnnnnnnnnnnnnnnnnnnnnnnnnnnnnnnnnnnnnnnnnnnnnnnnnnnnnnnnnnnnnnnnnnnnnnnnnnnnnnnnnnnnnnnnnnnnnnnnnnnnnnnnnnnnnnnnnnnnnnnnnnnnnnnnnnnnnnnnnnnnnnnnnnnnnnnnnnnnnnnnnnnnnnnnnnnnnnnnnnnnnnnnnnnnnnnnnnnnnnnnnnnnnnnnnnnnnnnnnnnnnnnnnnnnnnnnnnnnnnnnnnnnnnnnnnnnnnnnnnnnnnnnnnnnnnnnnnnnnnnnnnnnnnnnnnnnnnnnnnnnnnnnnnnnnnnnnnnnnnnnnnnnnnnnnnnnnnnnnnnnnnnnnnnnnnnnnnnnnnnnnnnnnnnnnnnnnnnnnnnnnnnnnnnnnnnnnnnnnnnnnnnnnnnnnnnnnnnnnnnnnnnnnnnnnnnnnnnnnnnnnnnnnnnnnnnnnnnnnnnnnnnnnnnnnnnnnnnnnnnnnnnnnnnnnnnnnnnnnnnnnnnnnnnnnnnnnnnnnnnnnnnnnnnnnnnnnnnnnnnnnnnnnnnnnnnnnnnnnnnnnnnnnnnnnnnnnnnnnnnnnnnnnnnnnnnnnnnnnnnnnnnnnnnnnnnnnnnnnnnnnnnnnnnnnnnnnnnnnnnnnnnnnnnnnnnnnnnnnnnnnnnnnnnnnnnnnnnnnnnnnnnnnnnnnnnnnnnnnnnnnnnnnnnnnnnnnnnnnnnnnnnnnnnnnnnnnnnnnnnnnnnnnnnnnnnnnnnnnnnnnnnnnnnnnnnnnnnnnnnnnnnnnnnnnnnnnnnnnnnnnnnnnnnnnnnnnnnnnnnnnnnnnnnnnnnnnnnnnnnnnnnnnnnnnnnnnnnnnnnnnnnnnnnnnnnnnnnnnnnnnnnnnnnnnnnnnnnnnnnnnnnnnnnnnnnnnnnnnnnnnnnnnnnnnnnnnnnnnnnnnnnnnnnnnnnnnnnnnnnnnnnnnnnnnnnnnnnnnnnnnnnnnnnnnnnnnnnnnnnnnnnnnnnnnnnnnnnnnnnnnnnnnnnnnnnnnnnnnnnnnnnnnnnnnnnnnnnnnnnnnnnnnnnnnnnnnnnnnnnnnnnnnnnnnnnnnnnnnnnnnnnnnnnnnnnnnnnnnnnnnnnnnnnnnnnnnnnnnnnnnnnnnnnnnnnnnnnnnnnnnnnnnnnnnnnnnnnnnnnnnnnnnnnnnnnnnnnnnnnnnnnnnnnnnnnnnnnnnnnnnnnnnnnnnnnnnnnnnnnnnnnnnnnnnnnnnnnnnnnnnnnnnnnnnnnnnnnnnnnnnnnnnnnnnnnnnnnnnnnnnnnnnnnnnnnnnnnnnnnnnnnnnnnnnnnnnnnnnnnnnnnnnnnnnnnnnnnnnnnnnnnnnnnnnnnnnnnnnnnnnnnnnnnnnnnnnnnnnnnnnnnnnnnnnnnnnnnnnnnnnnnnnnnnnnnnnnnnnnnnnnnnnnnnnnnnnnnnnnnnnnnnnnnnnnnnnnnnnnnnnnnnnnnnnnnnnnnnnnnnnnnnnnnnnnnnnnnnnnnnnnnnnnnnnnnnnnnnnnnnnnnnnnnnnnnnnnnnnnnnnnnnnnnnnnnnnnnnnnnnnnnnnnnnnnnnnnnnnnnnnnnnnnnnnnnnnnnnnnnnnnnnnnnnnnnnnnnnnnnnnnnnnnnnnnnnnnnnnnnnnnnnnnnnnnnnnnnnnnnnnnnnnnnnnnnnnnnnnnnnnnnnnnnnnnnnnnnnnnnnnnnnnnnnnnnnnnnnnnnnnnnnnnnnnnnnnnnnnnnnnnnnnnnnnnnnnnnnnnnnnnnnnnnnnnnnnnnnnnnnnnnnnnnnnnnnnnnnnnnnnnnnnnnnnnnnnnnnnnnnnnnnnnnnnnnnnnnnnnnnnnnnnnnnnnnnnnnnnnnnnnnnnnnnnnnnnnnnnnnnnnnnnnnnnnnnnnnnnnnnnnnnnnnnnnnnnnnnnnnnnnnnnnnnnnnnnnnnnnnnnnnnnnnnnnnnnnnnnnnnnnnnnnnnnnnnnnnnnnnnnnnnnnnnnnnnnnnnnnnnnnnnnnnnnnnnnnnnnnnnnnnnnnnnnnnnnnnnnnnnnnnnnnnnnnnnnnnnnnnnnnnnnnnnnnnnnnnnnnnnnnnnnnnnnnnnnnnnnnnnnnnnnnnnnnnnnnnnnnnnnnnnnnnnnnnnnnnnnnnnnnnnnnnnnnnnnnnnnnnnnnnnnnnnnnnnnnnnnnnnnnnnnnnnnnnnnnnnnnnnnnnnnnnnnnnnnnnnnnnnnnnnnnnnnnnnnnnnnnnnnnnnnnnnnnnnnnnnnnnnnnnnnnnnnnnnnnnnnnnnnnnnnnnnnnnnnnnnnnnnnnnnnnnnnnnnnnnnnnnnnnnnnnnnnnnnnnnnnnnnnnnnnnnnnnnnnnnnnnnnnnnnnnnnnnnnnnnnnnnnnnnnnnnnnnnnnnnnnnnnnnnnnnnnnnnnnnnnnnnnnnnnnnnnnnnnnnnnnnnnnnnnnnnnnnnnnnnnnnnnnnnnnnnnnnnnnnnnnnnnnnnnnnnnnnnnnnnnnnnnnnnnnnnnnnnnnnnnnnnnnnnnnnnnnnnnnnnnnnnnnnnnnnnnnnnnnnnnnnnnnnnnnnnnnnnnnnnnnnnnnnnnnnnnnnnnnnnnnnnnnnnnnnnnnnnnnnnnnnnnnnnnnnnnnnnnnnnnnnnnnnnnnnnnnnnnnnnnnnnnnnnnnnnnnnnnnnnnnnnnnnnnnnnnnnnnnnnnnnnnnnnnnnnnnnnnnnnnnnnnnnnnnnnnnnnnnnnnnnnnnnnnnnnnnnnnnnnnnnnnnnnnnnnnnnnnnnnnnnnnnnnnnnnnnnnnnnnnnnnnnnnnnnnnnnnnnnnnnnnnnnnnnnnnnnnnnnnnnnnnnnnnnnnnnnnnnnnnnnnnnnnnnnnnnnnnnnnnnnnnnnnnnnnnnnnnnnnnnnnnnnnnnnnnnnnnnnnnnnnnnnnnnnnnnnnnnnnnnnnnnnnnnnnnnnnnnnnnnnnnnnnnnnnnnnnnnnnnnnnnnnnnnnnnnnnnnnnnnnnnnnnnnnnnnnnnnnnnnnnnnnnnnnnnnnnnnnnnnnnnnnnnnnnnnnnnnnnnnnnnnnnnnnnnnnnnnnnnnnnnnnnnnnnnnnnnnnnnnnnnnnnnnnnnnnnnnnnnnnnnnnnnnnnnnnnnnnnnnnnnnnnnnnnnnnnnnnnnnnnnnnnnnnnnnnnnnnnnnnnnnnnnnnnnnnnnnnnnnnnnnnnnnnnnnnnnnnnnnnnnnnnnnnnnnnnnnnnnnnnnnnnnnnnnnnnnnnnnnnnnnnnnnnnnnnnnnnnnnnnnnnnnnnnnnnnnnnnnnnnnnnnnnnnnnnnnnnnnnnnnnnnnnnnnnnnnnnnnnnnnnnnnnnnnnnnnnnnnnnnnnnnnnnnnnnnnnnnnnnnnnnnnnnnnnnnnnnnnnnnnnnnnnnnnnnnnnnnnnnnnnnnnnnnnnnnnnnnnnnnnnnnnnnnnnnnnnnnnnnnnnnnnnnnnnnnnnnnnnnnnnnnnnnnnnnnnnnnnnnnnnnnnnnnnnnnnnnnnnnnnnnnnnnnnnnnnnnnnnnnnnnnnnnnnnnnnnnnnnnnnnnnnnnnnnnnnnnnnnnnnnnnnnnnnnnnnnnnnnnnnnnnnnnnnnnnnnnnnnnnnnnnnnnnnnnnnnnnnnnnnnnnnnnnnnnnnnnnnnnnnnnnnnnnnnnnnnnnnnnnnnnnnnnnnnnnnnnnnnnnnnnnnnnnnnnnnnnnnnnnnnnnnnnnnnnnnnnnnnnnnnnnnnnnnnnnnnnnnnnnnnnnnnnnnnnnnnnnnnnnnnnnnnnnnnnnnnnnnnnnnnnnnnnnnnnnnnnnnnnnnnnnnnnnnnnnnnnnnnnnnnnnnnnnnnnnnnnnnnnnnnnnnnnnnnnnnnnnnnnnnnnnnnnnnnnnnnnnnnnnnnnnnnnnnnnnnnnnnnnnnnnnnnnnnnnnnnnnnnnnnnnnnnnnnnnnnnnnnnnnnnnnnnnnnnnnnnnnnnnnnnnnnnnnnnnnnnnnnnnnnnnnnnnnnnnnnnnnnnnnnnnnnnnnnnnnnnnnnnnnnnnnnnnnnnnnnnnnnnnnnnnnnnnnnnnnnnnnnnnnnnnnnnnnnnnnnnnnnnnnnnnnnnnnnnnnnnnnnnnnnnnnnnnnnnnnnnnnnnnnnnnnnnnnnnnnnnnnnnnnnnnnnnnnnnnnnnnnnnnnnnnnnnnnnnnnnnnnnnnnnnnnnnnnnnnnnnnnnnnnnnnnnnnnnnnnnnnnnnnnnnnnnnnnnnnnnnnnnnnnnnnnnnnnnnnnnnnnnnnnnnnnnnnnnnnnnnnnnnnnnnnnnnnnnnnnnnnnnnnnnnnnnnnnnnnnnnnnnnnnnnnnnnnnnnnnnnnnnnnnnnnnnnnnnnnnnnnnnnnnnnnnnnnnnnnnnnnnnnnnnnnnnnnnnnnnnnnnnnnnnnnnnnnnnnnnnnnnnnnnnnnnnnnnnnnnnnnnnnnnnnnnnnnnnnnnnnnnnnnnnnnnnnnnnnnnnnnnnnnnnnnnnnnnnnnnnnnnnnnnnnnnnnnnnnnnnnnnnnnnnnnnnnnnnnnnnnnnnnnnnnnnnnnnnnnnnnnnnnnnnnnnnnnnnnnnnnnnnnnnnnnnnnnnnnnnnnnnnnnnnnnnnnnnnnnnnnnnnnnnnnnnnnnnnnnnnnnnnnnnnnnnnnnnnnnnnnnnnnnnnnnnnnnnnnnnnnnnnnnnnnnnnnnnnnnnnnnnnnnnnnnnnnnnnnnnnnnnnnnnnnnnnnnnnnnnnnnnnnnnnnnnnnnnnnnnnnnnnnnnnnnnnnnnnnnnnnnnnnnnnnnnnnnnnnnnnnnnnnnnnnnnnnnnnnnnnnnnnnnnnnnnnnnnnnnnnnnnnnnnnnnnnnnnnnnnnnnnnnnnnnnnnnnnnnnnnnnnnnnnnnnnnnnnnnnnnnnnnnnnnnnnnnnnnnnnnnnnnnnnnnnnnnnnnnnnnnnnnnnnnnnnnnnnnnnnnnnnnnnnnnnnnnnnnnnnnnnnnnnnnnnnnnnnnnnnnnnnnnnnnnnnnnnnnnnnnnnnnnnnnnnnnnnnnnnnnnnnnnnnnnnnnnnnnnnnnnnnnnnnnnnnnnnnnnnnnnnnnnnnnnnnnnnnnnnnnnnnnnnnnnnnnnnnnnnnnnnnnnnnnnnnnnnnnnnnnnnnnnnnnnnnnnnnnnnnnnnnnnnnnnnnnnnnnnnnnnnnnnnnnnnnnnnnnnnnnnnnnnnnnnnnnnnnnnnnnnnnnnnnnnnnnnnnnnnnnnnnnnnnnnnnnnnnnnnnnnnnnnnnnnnnnnnnnnnnnnnnnnnnnnnnnnnnnnnnnnnnnnnnnnnnnnnnnnnnnnnnnnnnnnnnnnnnnnnnnnnnnnnnnnnnnnnnnnnnnnnnnnnnnnnnnnnnnnnnnnnnnnnnnnnnnnnnnnnnnnnnnnnnnnnnnnnnnnnnnnnnnnnnnnnnnnnnnnnnnnnnnnnnnnnnnnnnnnnnnnnnnnnnnnnnnnnnnnnnnnnnnnnnnnnnnnnnnnnnnnnnnnnnnnnnnnnnnnnnnnnnnnnnnnnnnnnnnnnnnnnnnnnnnnnnnnnnnnnnnnnnnnnnnnnnnnnnnnnnnnnnnnnnnnnnnnnnnnnnnnnnnnnnnnnnnnnnnnnnnnnnnnnnnnnnnnnnnnnnnnnnnnnnnnnnnnnnnnnnnnnnnnnnnnnnnnnnnnnnnnnnnnnnnnnnnnnnnnnnnnnnnnnnnnnnnnnnnnnnnnnnnnnnnnnnnnnnnnnnnnnnnnnnnnnnnnnnnnnnnnnnnnnnnnnnnnnnnnnnnnnnnnnnnnnnnnnnnnnnnnnnnnnnnnnnnnnnnnnnnnnnnnnnnnnnnnnnnnnnnnnnnnnnnnnnnnnnnnnnnnnnnnnnnnnnnnnnnnnnnnnnnnnnnnnnnnnnnnnnnnnnnnnnnnnnnnnnnnnnnnnnnnnnnnnnnnnnnnnnnnnnnnnnnnnnnnnnnnnnnnnnnnnnnnnnnnnnnnnnnnnnnnnnnnnnnnnnnnnnnnnnnnnnnnnnnnnnnnnnnnnnnnnnnnnnnnnnnnnnnnnnnnnnnnnnnnnnnnnnnnnnnnnnnnnnnnnnnnnnnnnnnnnnnnnnnnnnnnnnnnnnnnnnnnnnnnnnnnnnnnnnnnnnnnnnnnnnnnnnnnnnnnnnnnnnnnnnnnnnnnnnnnnnnnnnnnnnnnnnnnnnnnnnnnnnnnnnnnnnnnnnnnnnnnnnnnnnnnnnnnnnnnnnnnnnnnnnnnnnnnnnnnnnnnnnnnnnnnnnnnnnnnnnnnnnnnnnnnnnnnnnnnnnnnnnnnnnnnnnnnnnnnnnnnnnnnnnnnnnnnnnnnnnnnnnnnnnnnnnnnnnnnnnnnnnnnnnnnnnnnnnnnnnnnnnnnnnnnnnnnnnnnnnnnnnnnnnnnnnnnnnnnnnnnnnnnnnnnnnnnnnnnnnnnnnnnnnnnnnnnnnnnnnnnnnnnnnnnnnnnnnnnnnnnnnnnnnnnnnnnnnnnnnnnnnnnnnnnnnnnnnnnnnnnnnnnnnnnnnnnnnnnnnnnnnnnnnnnnnnnnnnnnnnnnnnnnnnnnnnnnnnnnnnnnnnnnnnnnnnnnnnnnnnnnnnnnnnnnnnnnnnnnnnnnnnnnnnnnnnnnnnnnnnnnnnnnnnnnnnnnnnnnnnnnnnnnnnnnnnnnnnnnnnnnnnnnnnnnnnnnnnnnnnnnnnnnnnnnnnnnnnnnnnnnnnnnnnnnnnnnnnnnnnnnnnnnnnnnnnnnnnnnnnnnnnnnnnnnnnnnnnnnnnnnnnnnnnnnnnnnnnnnnnnnnnnnnnnnnnnnnnnnnnnnnnnnnnnnnnnnnnnnnnnnnnnnnnnnnnnnnnnnnnnnnnnnnnnnnnnnnnnnnnnnnnnnnnnnnnnnnnnnnnnnnnnnnnnnnnnnnnnnnnnnnnnnnnnnnnnnnnnnnnnnnnnnnnnnnnnnnnnnnnnnnnnnnnnnnnnnnnnnnnnnnnnnnnnnnnnnnnnnnnnnnnnnnnnnnnnnnnnnnnnnnnnnnnnnnnnnnnnnnnnnnnnnnnnnnnnnnnnnnnnnnnnnnnnnnnnnnnnnnnnnnnnnnnnnnnnnnnnnnnnnnnnnnnnnnnnnnnnnnnnnnnnnnnnnnnnnnnnnnnnnnnnnnnnnnnnnnnnnnnnnnnnnnnnnnnnnnnnnnnnnnnnnnnnnnnnnnnnnnnnnnnnnnnnnnnnnnnnnnnnnnnnnnnnnnnnnnnnnnnnnnnnnnnnnnnnnnnnnnnnnnnnnnnnnnnnnnnnnnnnnnnnnnnnnnnnnnnnnnnnnnnnnnnnnnnnnnnnnnnnnnnnnnnnnnnnnnnnnnnnnnnnnnnnnnnnnnnnnnnnnnnnnnnnnnnnnnnnnnnnnnnnnnnnnnnnnnnnnnnnnnnnnnnnnnnnnnnnnnnnnnnnnnnnnnnnnnnnnnnnnnnnnnnnnnnnnnnnnnnnnnnnnnnnnnnnnnnnnnnnnnnnnnnnnnnnnnnnnnnnnnnnnnnnnnnnnnnnnnnnnnnnnnnnnnnnnnnnnnnnnnnnnnnnnnnnnnnnnnnnnnnnnnnnnnnnnnnnnnnnnnnnnnnnnnnnnnnnnnnnnnnnnnnnnnnnnnnnnnnnnnnnnnnnnnnnnnnnnnnnnnnnnnnnnnnnnnnnnnnnnnnnnnnnnnnnnnnnnnnnnnnnnnnnnnnnnnnnnnnnnnnnnnnnnnnnnnnnnnnnnnnnnnnnnnnnnnnnnnnnnnnnnnnnnnnnnnnnnnnnnnnnnnnnnnnnnnnnnnnnnnnnnnnnnnnnnnnnnnnnnnnnnnnnnnnnnnnnnnnnnnnnnnnnnnnnnnnnnnnnnnnnnnnnnnnnnnnnnnnnnnnnnnnnnnnnnnnnnnnnnnnnnnnnnnnnnnnnnnnnnnnnnnnnnnnnnnnnnnnnnnnnnnnnnnnnnnnnnnnnnnnnnnnnnnnnnnnnnnnnnnnnnnnnnnnnnnnnnnnnnnnnnnnnnnnnnnnnnnnnnnnnnnnnnnnnnnnnnnnnnnnnnnnnnnnnnnnnnnnnnnnnnnnnnnnnnnnnnnnnnnnnnnnnnnnnnnnnnnnnnnnnnnnnnnnnnnnnnnnnnnnnnnnnnnnnnnnnnnnnnnnnnnnnnnnnnnnnnnnnnnnnnnnnnnnnnnnnnnnnnnnnnnnnnnnnnnnnnnnnnnnnnnnnnnnnnnnnnnnnnnnnnnnnnnnnnnnnnnnnnnnnnnnnnnnnnnnnnnnnnnnnnnnnnnnnnnnnnnnnnnnnnnnnnnnnnnnnnnnnnnnnnnnnnnnnnnnnnnnnnnnnnnnnnnnnnnnnnnnnnnnnnnnnnnnnnnnnnnnnnnnnnnnnnnnnnnnnnnnnnnnnnnnnnnnnnnnnnnnnnnnnnnnnnnnnnnnnnnnnnnnnnnnnnnnnnnnnnnnnnnnnnnnnnnnnnnnnnnnnnnnnnnnnnnnnnnnnnnnnnnnnnnnnnnnnnnnnnnnnnnnnnnnnnnnnnnnnnnnnnnnnnnnnnnnnnnnnnnnnnnnnnnnnnnnnnnnnnnnnnnnnnnnnnnnnnnnnnnnnnnnnnnnnnnnnnnnnnnnnnnnnnnnnnnnnnnnnnnnnnnnnnnnnnnnnnnnnnnnnnnnnnnnnnnnnnnnnnnnnnnnnnnnnnnnnnnnnnnnnnnnnnnnnnnnnnnnnnnnnnnnnnnnnnnnnnnnnnnnnnnnnnnnnnnnnnnnnnnnnnnnnnnnnnnnnnnnnnnnnnnnnnnnnnnnnnnnnnnnnnnnnnnnnnnnnnnnnnnnnnnnnnnnnnnnnnnnnnnnnnnnnnnnnnnnnnnnnnnnnnnnnnnnnnnnnnnnnnnnnnnnnnnnnnnnnnnnnnnnnnnnnnnnnnnnnnnnnnnnnnnnnnnnnnnnnnnnnnnnnnnnnnnnnnnnnnnnnnnnnnnnnnnnnnnnnnnnnnnnnnnnnnnnnnnnnnnnnnnnnnnnnnnnnnnnnnnnnnnnnnnnnnnnnnnnnnnnnnnnnnnnnnnnnnnnnnnnnnnnnnnnnnnnnnnnnnnnnnnnnnnnnnnnnnnnnnnnnnnnnnnnnnnnnnnnnnnnnnnnnnnnnnnnnnnnnnnnnnnnnnnnnnnnnnnnnnnnnnnnnnnnnnnnnnnnnnnnnnnnnnnnnnnnnnnnnnnnnnnnnnnnnnnnnnnnnnnnnnnnnnnnnnnnnnnnnnnnnnnnnnnnnnnnnnnnnnnnnnnnnnnnnnnnnnnnnnnnnnnnnnnnnnnnnnnnnnnnnnnnnnnnnnnnnnnnnnnnnnnnnnnnnnnnnnnnnnnnnnnnnnnnnnnnnnnnnnnnnnnnnnnnnnnnnnnnnnnnnnnnnnnnnnnnnnnnnnnnnnnnnnnnnnnnnnnnnnnnnnnnnnnnnnnnnnnnnnnnnnnnnnnnnnnnnnnnnnnnnnnnnnnnnnnnnnnnnnnnnnnnnnnnnnnnnnnnnnnnnnnnnnnnnnnnnnnnnnnnnnnnnnnnnnnnnnnnnnnnnnnnnnnnnnnnnnnnnnnnnnnnnnnnnnnnnnnnnnnnnnnnnnnnnnnnnnnnnnnnnnnnnnnnnnnnnnnnnnnnnnnnnnnnnnnnnnnnnnnnnnnnnnnnnnnnnnnnnnnnnnnnnnnnnnnnnnnnnnnnnnnnnnnnnnnnnnnnnnnnnnnnnnnnnnnnnnnnnnnnnnnnnnnnnnnnnnnnnnnnnnnnnnnnnnnnnnnnnnnnnnnnnnnnnnnnnnnnnnnnnnnnnnnnnnnnnnnnnnnnnnnnnnnnnnnnnnnnnnnnnnnnnnnnnnnnnnnnnnnnnnnnnnnnnnnnnnnnnnnnnnnnnnnnnnnnnnnnnnnnnnnnnnnnnnnnnnnnnnnnnnnnnnnnnnnnnnnnnnnnnnnnnnnnnnnnnnnnnnnnnnnnnnnnnnnnnnnnnnnnnnnnnnnnnnnnnnnnnnnnnnnnnnnnnnnnnnnnnnnnnnnnnnnnnnnnnnnnnnnnnnnnnnnnnnnnnnnnnnnnnnnnnnnnnnnnnnnnnnnnnnnnnnnnnnnnnnnnnnnnnnnnnnnnnnnnnnnnnnnnnnnnnnnnnnnnnnnnnnnnnnnnnnnnnnnnnnnnnnnnnnnnnnnnnnnnnnnnnnnnnnnnnnnnnnnnnnnnnnnnnnnnnnnnnnnnnnnnnnnnnnnnnnnnnnnnnnnnnnnnnnnnnnnnnnnnnnnnnnnnnnnnnnnnnnnnnnnnnnnnnnnnnnnnnnnnnnnnnnnnnnnnnnnnnnnnnnnnnnnnnnnnnnnnnnnnnnnnnnnnnnnnnnnnnnnnnnnnnnnnnnnnnnnnnnnnnnnnnnnnnnnnnnnnnnnnnnnnnnnnnnnnnnnnnnnnnnnnnnnnnnnnnnnnnnnnnnnnnnnnnnnnnnnnnnnnnnnnnnnnnnnnnnnnnnnnnnnnnnnnnnnnnnnnnnnnnnnnnnnnnnnnnnnnnnnnnnnnnnnnnnnnnnnnnnnnnnnnnnnnnnnnnnnnnnnnnnnnnnnnnnnnnnnnnnnnnnnnnnnnnnnnnnnnnnnnnnnnnnnnnnnnnnnnnnnnnnnnnnnnnnnnnnnnnnnnnnnnnnnnnnnnnnnnnnnnnnnnnnnnnnnnnnnnnnnnnnnnnnnnnnnnnnnnnnnnnnnnnnnnnnnnnnnnnnnnnnnnnnnnnnnnnnnnnnnnnnnnnnnnnnnnnnnnnnnnnnnnnnnnnnnnnnnnnnnnnnnnnnnnnnnnnnnnnnnnnnnnnnnnnnnnnnnnnnnnnnnnnnnnnnnnnnnnnnnnnnnnnnnnnnnnnnnnnnnnnnnnnnnnnnnnnnnnnnnnnnnnnnnnnnnnnnnnnnnnnnnnnnnnnnnnnnnnnnnnnnnnnnnnnnnnnnnnnnnnnnnnnnnnnnnnnnnnnnnnnnnnnnnnnnnnnnnnnnnnnnnnnnnnnnnnnnnnnnnnnnnnnnnnnnnnnnnnnnnnnnnnnnnnnnnnnnnnnnnnnnnnnnnnnnnnnnnnnnnnnnnnnnnnnnnnnnnnnnnnnnnnnnnnnnnnnnnnnnnnnnnnnnnnnnnnnnnnnnnnnnnnnnnnnnnnnnnnnnnnnnnnnnnnnnnnnnnnnnnnnnnnnnnnnnnnnnnnnnnnnnnnnnnnnnnnnnnnnnnnnnnnnnnnnnnnnnnnnnnnnnnnnnnnnnnnnnnnnnnnnnnnnnnnnnnnnnnnnnnnnnnnnnnnnnnnnnnnnnnnnnnnnnnnnnnnnnnnnnnnnnnnnnnnnnnnnnnnnnnnnnnnnnnnnnnnnnnnnnnnnnnnnnnnnnnnnnnnnnnnnnnnnnnnnnnnnnnnnnnnnnnnnnnnnnnnnnnnnnnnnnnnnnnnnnnnnnnnnnnnnnnnnnnnnnnnnnnnnnnnnnnnnnnnnnnnnnnnnnnnnnnnnnnnnnnnnnnnnnnnnnnnnnnnnnnnnnnnnnnnnnnnnnnnnnnnnnnnnnnnnnnnnnnnnnnnnnnnnnnnnnnnnnnnnnnnnnnnnnnnnnnnnnnnnnnnnnnnnnnnnnnnnnnnnnnnnnnnnnnnnnnnnnnnnnnnnnnnnnnnnnnnnnnnnnnnnnnnnnnnnnnnnnnnnnnnnnnnnnnnnnnnnnnnnnnnnnnnnnnnnnnnnnnnnnnnnnnnnnnnnnnnnnnnnnnnnnnnnnnnnnnnnnnnnnnnnnnnnnnnnnnnnnnnnnnnnnnnnnnnnnnnnnnnnnnnnnnnnnnnnnnnnnnnnnnnnnnnnnnnnnnnnnnnnnnnnnnnnnnnnnnnnnnnnnnnnnnnnnnnnnnnnnnnnnnnnnnnnnnnnnnnnnnnnnnnnnnnnnnnnnnnnnnnnnnnnnnnnnnnnnnnnnnnnnnnnnnnnnnnnnnnnnnnnnnnnnnnnnnnnnnnnnnnnnnnnnnnnnnnnnnnnnnnnnnnnnnnnnnnnnnnnnnnnnnnnnnnnnnnnnnnnnnnnnnnnnnnnnnnnnnnnnnnnnnnnnnnnnnnnnnnnnnnnnnnnnnnnnnnnnnnnnnnnnnnnnnnnnnnnnnnnnnnnnnnnnnnnnnnnnnnnnnnnnnnnnnnnnnnnnnnnnnnnnnnnnnnnnnnnnnnnnnnnnnnnnnnnnnnnnnnnnnnnnnnnnnnnnnnnnnnnnnnnnnnnnnnnnnnnnnnnnnnnnnnnnnnnnnnnnnnnnnnnnnnnnnnnnnnnnnnnnnnnnnnnnnnnnnnnnnnnnnnnnnnnnnnnnnnnnnnnnnnnnnnnnnnnnnnnnnnnnnnnnnnnnnnnnnnnnnnnnnnnnnnnnnnnnnnnnnnnnnnnnnnnnnnnnnnnnnnnnnnnnnnnnnnnnnnnnnnnnnnnnnnnnnnnnnnnnnnnnnnnnnnnnnnnnnnnnnnnnnnnnnnnnnnnnnnnnnnnnnnnnnnnnnnnnnnnnnnnnnnnnnnnnnnnnnnnnnnnnnnnnnnnnnnnnnnnnnnnnnnnnnnnnnnnnnnnnnnnnnnnnnnnnnnnnnnnnnnnnnnnnnnnnnnnnnnnnnnnnnnnnnnnnnnnnnnnnnnnnnnnnnnnnnnnnnnnnnnnnnnnnnnnnnnnnnnnnnnnnnnnnnnnnnnnnnnnnnnnnnnnnnnnnnnnnnnnnnnnnnnnnnnnnnnnnnnnnnnnnnnnnnnnnnnnnnnnnnnnnnnnnnnnnnnnnnnnnnnnnnnnnnnnnnnnnnnnnnnnnnnnnnnnnnnnnnnnnnnnnnnnnnnnnnnnnnnnnnnnnnnnnnnnnnnnnnnnnnnnnnnnnnnnnnnnnnnnnnnnnnnnnnnnnnnnnnnnnnnnnnnnnnnnnnnnnnnnnnnnnnnnnnnnnnnnnnnnnnnnnnnnnnnnnnnnnnnnnnnnnnnnnnnnnnnnnnnnnnnnnnnnnnnnnnnnnnnnnnnnnnnnnnnnnnnnnnnnnnnnnnnnnnnnnnnnnnnnnnnnnnnnnnnnnnnnnnnnnnnnnnnnnnnnnnnnnnnnnnnnnnnnnnnnnnnnnnnnnnnnnnnnnnnnnnnnnnnnnnnnnnnnnnnnnnnnnnnnnnnnnnnnnnnnnnnnnnnnnnnnnnnnnnnnnnnnnnnnnnnnnnnnnnnnnnnnnnnnnnnnnnnnnnnnnnnnnnnnnnnnnnnnnnnnnnnnnnnnnnnnnnnnnnnnnnnnnnnnnnnnnnnnnnnnnnnnnnnnnnnnnnnnnnnnnnnnnnnnnnnnnnnnnnnnnnnnnnnnnnnnnnnnnnnnnnnnnnnnnnnnnnnnnnnnnnnnnnnnnnnnnnnnnnnnnnnnnnnnnnnnnnnnnnnnnnnnnnnnnnnnnnnnnnnnnnnnnnnnnnnnnnnnnnnnnnnnnnnnnnnnnnnnnnnnnnnnnnnnnnnnnnnnnnnnnnnnnnnnnnnnnnnnnnnnnnnnnnnnnnnnnnnnnnnnnnnnnnnnnnnnnnnnnnnnnnnnnnnnnnnnnnnnnnnnnnnnnnnnnnnnnnnnnnnnnnnnnnnnnnnnnnnnnnnnnnnnnnnnnnnnnnnnnnnnnnnnnnnnnnnnnnnnnnnnnnnnnnnnnnnnnnnnnnnnnnnnnnnnnnnnnnnnnnnnnnnnnnnnnnnnnnnnnnnnnnnnnnnnnnnnnnnnnnnnnnnnnnnnnnnnnnnnnnnnnnnnnnnnnnnnnnnnnnnnnnnnnnnnnnnnnnnnnnnnnnnnnnnnnnnnnnnnnnnnnnnnnnnnnnnnnnnnnnnnnnnnnnnnnnnnnnnnnnnnnnnnnnnnnnnnnnnnnnnnnnnnnnnnnnnnnnnnnnnnnnnnnnnnnnnnnnnnnnnnnnnnnnnnnnnnnnnnnnnnnnnnnnnnnnnnnnnnnnnnnnnnnnnnnnnnnnnnnnnnnnnnnnnnnnnnnnnnnnnnnnnnnnnnnnnnnnnnnnnnnnnnnnnnnnnnnnnnnnnnnnnnnnnnnnnnnnnnnnnnnnnnnnnnnnnnnnnnnnnnnnnnnnnnnnnnnnnnnnnnnnnnnnnnnnnnnnnnnnnnnnnnnnnnnnnnnnnnnnnnnnnnnnnnnnnnnnnnnnnnnnnnnnnnnnnnnnnnnnnnnnnnnnnnnnnnnnnnnnnnnnnnnnnnnnnnnnnnnnnnnnnnnnnnnnnnnnnnnnnnnnnnnnnnnnnnnnnnnnnnnnnnnnnnnnnnnnnnnnnnnnnnnnnnnnnnnnnnnnnnnnnnnnnnnnnnnnnnnnnnnnnnnnnnnnnnnnnnnnnnnnnnnnnnnnnnnnnnnnnnnnnnnnnnnnnnnnnnnnnnnnnnnnnnnnnnnnnnnnnnnnnnnnnnnnnnnnnnnnnnnnnnnnnnnnnnnnnnnnnnnnnnnnnnnnnnnnnnnnnnnnnnnnnnnnnnnnnnnnnnnnnnnnnnnnnnnnnnnnnnnnnnnnnnnnnnnnnnnnnnnnnnnnnnnnnnnnnnnnnnnnnnnnnnnnnnnnnnnnnnnnnnnnnnnnnnnnnnnnnnnnnnnnnnnnnnnnnnnnnnnnnnnnnnnnnnnnnnnnnnnnnnnnnnnnnnnnnnnnnnnnnnnnnnnnnnnnnnnnnnnnnnnnnnnnnnnnnnnnnnnnnnnnnnnnnnnnnnnnnnnnnnnnnnnnnnnnnnnnnnnnnnnnnnnnnnnnnnnnnnnnnnnnnnnnnnnnnnnnnnnnnnnnnnnnnnnnnnnnnnnnnnnnnnnnnnnnnnnnnnnnnnnnnnnnnnnnnnnnnnnnnnnnnnnnnnnnnnnnnnnnnnnnnnnnnnnnnnnnnnnnnnnnnnnnnnnnnnnnnnnnnnnnnnnnnnnnnnnnnnnnnnnnnnnnnnnnnnnnnnnnnnnnnnnnnnnnnnnnnnnnnnnnnnnnnnnnnnnnnnnnnnnnnnnnnnnnnnnnnnnnnnnnnnnnnnnnnnnnnnnnnnnnnnnnnnnnnnnnnnnnnnnnnnnnnnnnnnnnnnnnnnnnnnnnnnnnnnnnnnnnnnnnnnnnnnnnnnnnnnnnnnnnnnnnnnnnnnnnnnnnnnnnnnnnnnnnnnnnnnnnnnnnnnnnnnnnnnnnnnnnnnnnnnnnnnnnnnnnnnnnnnnnnnnnnnnnnnnnnnnnnnnnnnnnnnnnnnnnnnnnnnnnnnnnnnnnnnnnnnnnnnnnnnnnnnnnnnnnnnnnnnnnnnnnnnnnnnnnnnnnnnnnnnnnnnnnnnnnnnnnnnnnnnnnnnnnnnnnnnnnnnnnnnnnnnnnnnnnnnnnnnnnnnnnnnnnnnnnnnnnnnnnnnnnnnnnnnnnnnnnnnnnnnnnnnnnnnnnnnnnnnnnnnnnnnnnnnnnnnnnnnnnnnnnnnnnnnnnnnnnnnnnnnnnnnnnnnnnnnnnnnnnnnnnnnnnnnnnnnnnnnnnnnnnnnnnnnnnnnnnnnnnnnnnnnnnnnnnnnnnnnnnnnnnnnnnnnnnnnnnnnnnnnnnnnnnnnnnnnnnnnnnnnnnnnnnnnnnnnnnnnnnnnnnnnnnnnnnnnnnnnnnnnnnnnnnnnnnnnnnnnnnnnnnnnnnnnnnnnnnnnnnnnnnnnnnnnnnnnnnnnnnnnnnnnnnnnnnnnnnnnnnnnnnnnnnnnnnnnnnnnnnnnnnnnnnnnnnnnnnnnnnnnnnnnnnnnnnnnnnnnnnnnnnnnnnnnnnnnnnnnnnnnnnnnnnnnnnnnnnnnnnnnnnnnnnnnnnnnnnnnnnnnnnnnnnnnnnnnnnnnnnnnnnnnnnnnnnnnnnnnnnnnnnnnnnnnnnnnnnnnnnnnnnnnnnnnnnnnnnnnnnnnnnnnnnnnnnnnnnnnnnnnnnnnnnnnnnnnnnnnnnnnnnnnnnnnnnnnnnnnnnnnnnnnnnnnnnnnnnnnnnnnnnnnnnnnnnnnnnnnnnnnnnnnnnnnnnnnnnnnnnnnnnnnnnnnnnnnnnnnnnnnnnnnnnnnnnnnnnnnnnnnnnnnnnnnnnnnnnnnnnnnnnnnnnnnnnnnnnnnnnnnnnnnnnnnnnnnnnnnnnnnnnnnnnnnnnnnnnnnnnnnnnnnnnnnnnnnnnnnnnnnnnnnnnnnnnnnnnnnnnnnnnnnnnnnnnnnnnnnnnnnnnnnnnnnnnnnnnnnnnnnnnnnnnnnnnnnnnnnnnnnnnnnnnnnnnnnnnnnnnnnnnnnnnnnnnnnnnnnnnnnnnnnnnnnnnnnnnnnnnnnnnnnnnnnnnnnnnnnnnnnnnnnnnnnnnnnnnnnnnnnnnnnnnnnnnnnnnnnnnnnnnnnnnnnnnnnnnnnnnnnnnnnnnnnnnnnnnnnnnnnnnnnnnnnnnnnnnnnnnnnnnnnnnnnnnnnnnnnnnnnnnnnnnnnnnnnnnnnnnnnnnnnnnnnnnnnnnnnnnnnnnnnnnnnnnnnnnnnnnnnnnnnnnnnnnnnnnnnnnnnnnnnnnnnnnnnnnnnnnnnnnnnnnnnnnnnnnnnnnnnnnnnnnnnnnnnnnnnnnnnnnnnnnnnnnnnnnnnnnnnnnnnnnnnnnnnnnnnnnnnnnnnnnnnnnnnnnnnnnnnnnnnnnnnnnnnnnnnnnnnnnnnnnnnnnnnnnnnnnnnnnnnnnnnnnnnnnnnnnnnnnnnnnnnnnnnnnnnnnnnnnnnnnnnnnnnnnnnnnnnnnnnnnnnnnnnnnnnnnnnnnnnnnnnnnnnnnnnnnnnnnnnnnnnnnnnnnnnnnnnnnnnnnnnnnnnnnnnnnnnnnnnnnnnnnnnnnnnnnnnnnnnnnnnnnnnnnnnnnnnnnnnnnnnnnnnnnnnnnnnnnnnnnnnnnnnnnnnnnnnnnnnnnnnnnnnnnnnnnnnnnnnnnnnnnnnnnnnnnnnnnnnnnnnnnnnnnnnnnnnnnnnnnnnnnnnnnnnnnnnnnnnnnnnnnnnnnnnnnnnnnnnnnnnnnnnnnnnnnnnnnnnnnnnnnnnnnnnnnnnnnnnnnnnnnnnnnnnnnnnnnnnnnnnnnnnnnnnnnnnnnnnnnnnnnnnnnnnnnnnnnnnnnnnnnnnnnnnnnnnnnnnnnnnnnnnnnnnnnnnnnnnnnnnnnnnnnnnnnnnnnnnnnnnnnnnnnnnnnnnnnnnnnnnnnnnnnnnnnnnnnnnnnnnnnnnnnnnnnnnnnnnnnnnnnnnnnnnnnnnnnnnnnnnnnnnnnnnnnnnnnnnnnnnnnnnnnnnnnnnnnnnnnnnnnnnnnnnnnnnnnnnnnnnnnnnnnnnnnnnnnnnnnnnnnnnnnnnnnnnnnnnnnnnnnnnnnnnnnnnnnnnnnnnnnnnnnnnnnnnnnnnnnnnnnnnnnnnnnnnnnnnnnnnnnnnnnnnnnnnnnnnnnnnnnnnnnnnnnnnnnnnnnnnnnnnnnnnnnnnnnnnnnnnnnnnnnnnnnnnnnnnnnnnnnnnnnnnnnnnnnnnnnnnnnnnnnnnnnnnnnnnnnnnnnnnnnnnnnnnnnnnnnnnnnnnnnnnnnnnnnnnnnnnnnnnnnnnnnnnnnnnnnnnnnnnnnnnnnnnnnnnnnnnnnnnnnnnnnnnnnnnnnnnnnnnnnnnnnnnnnnnnnnnnnnnnnnnnnnnnnnnnnnnnnnnnnnnnnnnnnnnnnnnnnnnnnnnnnnnnnnnnnnnnnnnnnnnnnnnnnnnnnnnnnnnnnnnnnnnnnnnnnnnnnnnnnnnnnnnnnnnnnnnnnnnnnnnnnnnnnnnnnnnnnnnnnnnnnnnnnnnnnnnnnnnnnnnnnnnnnnnnnnnnnnnnnnnnnnnnnnnnnnnnnnnnnnnnnnnnnnnnnnnnnnnnnnnnnnnnnnnnnnnnnnnnnnnnnnnnnnnnnnnnnnnnnnnnnnnnnnnnnnnnnnnnnnnnnnnnnnnnnnnnnnnnnnnnnnnnnnnnnnnnnnnnnnnnnnnnnnnnnnnnnnnnnnnnnnnnnnnnnnnnnnnnnnnnnnnnnnnnnnnnnnnnnnnnnnnnnnnnnnnnnnnnnnnnnnnnnnnnnnnnnnnnnnnnnnnnnnnnnnnnnnnnnnnnnnnnnnnnnnnnnnnnnnnnnnnnnnnnnnnnnnnnnnnnnnnnnnnnnnnnnnnnnnnnnnnnnnnnnnnnnnnnnnnnnnnnnnnnnnnnnnnnnnnnnnnnnnnnnnnnnnnnnnnnnnnnnnnnnnnnnnnnnnnnnnnnnnnnnnnnnnnnnnnnnnnnnnnnnnnnnnnnnnnnnnnnnnnnnnnnnnnnnnnnnnnnnnnnnnnnnnnnnnnnnnnnnnnnnnnnnnnnnnnnnnnnnnnnnnnnnnnnnnnnnnnnnnnnnnnnnnnnnnnnnnnnnnnnnnnnnnnnnnnnnnnnnnnnnnnnnnnnnnnnnnnnnnnnnnnnnnnnnnnnnnnnnnnnnnnnnnnnnnnnnnnnnnnnnnnnnnnnnnnnnnnnnnnnnnnnnnnnnnnnnnnnnnnnnnnnnnnnnnnnnnnnnnnnnnnnnnnnnnnnnnnnnnnnnnnnnnnnnnnnnnnnnnnnnnnnnnnnnnnnnnnnnnnnnnnnnnnnnnnnnnnnnnnnnnnnnnnnnnnnnnnnnnnnnnnnnnnnnnnnnnnnnnnnnnnnnnnnnnnnnnnnnnnnnnnnnnnnnnnnnnnnnnnnnnnnnnnnnnnnnnnnnnnnnnnnnnnnnnnnnnnnnnnnnnnnnnnnnnnnnnnnnnnnnnnnnnnnnnnnnnnnnnnnnnnnnnnnnnnnnnnnnnnnnnnnnnnnnnnnnnnnnnnnnnnnnnnnnnnnnnnnnnnnnnnnnnnnnnnnnnnnnnnnnnnnnnnnnnnnnnnnnnnnnnnnnnnnnnnnnnnnnnnnnnnnnnnnnnnnnnnnnnnnnnnnnnnnnnnnnnnnnnnnnnnnnnnnnnnnnnnnnnnnnnnnnnnnnnnnnnnnnnnnnnnnnnnnnnnnnnnnnnnnnnnnnnnnnnnnnnnnnnnnnnnnnnnnnnnnnnnnnnnnnnnnnnnnnnnnnnnnnnnnnnnnnnnnnnnnnnnnnnnnnnnnnnnnnnnnnnnnnnnnnnnnnnnnnnnnnnnnnnnnnnnnnnnnnnnnnnnnnnnnnnnnnnnnnnnnnnnnnnnnnnnnnnnnnnnnnnnnnnnnnnnnnnnnnnnnnnnnnnnnnnnnnnnnnnnnnnnnnnnnnnnnnnnnnnnnnnnnnnnnnnnnnnnnnnnnnnnnnnnnnnnnnnnnnnnnnnnnnnnnnnnnnnnnnnnnnnnnnnnnnnnnnnnnnnnnnnnnnnnnnnnnnnnnnnnnnnnnnnnnnnnnnnnnnnnnnnnnnnnnnnnnnnnnnnnnnnnnnnnnnnnnnnnnnnnnnnnnnnnnnnnnnnnnnnnnnnnnnnnnnnnnnnnnnnnnnnnnnnnnnnnnnnnnnnnnnnnnnnnnnnnnnnnnnnnnnnnnnnnnnnnnnnnnnnnnnnnnnnnnnnnnnnnnnnnnnnnnnnnnnnnnnnnnnnnnnnnnnnnnnnnnnnnnnnnnnnnnnnnnnnnnnnnnnnnnnnnnnnnnnnnnnnnnnnnnnnnnnnnnnnnnnnnnnnnnnnnnnnnnnnnnnnnnnnnnnnnnnnnnnnnnnnnnnnnnnnnnnnnnnnnnnnnnnnnnnnnnnnnnnnnnnnnnnnnnnnnnnnnnnnnnnnnnnnnnnnnnnnnnnnnnnnnnnnnnnnnnnnnnnnnnnnnnnnnnnnnnnnnnnnnnnnnnnnnnnnnnnnnnnnnnnnnnnnnnnnnnnnnnnnnnnnnnnnnnnnnnnnnnnnnnnnnnnnnnnnnnnnnnnnnnnnnnnnnnnnnnnnnnnnnnnnnnnnnnnnnnnnnnnnnnnnnnnnnnnnnnnnnnnnnnnnnnnnnnnnnnnnnnnnnnnnnnnnnnnnnnnnnnnnnnnnnnnnnnnnnnnnnnnnnnnnnnnnnnnnnnnnnnnnnnnnnnnnnnnnnnnnnnnnnnnnnnnnnnnnnnnnnnnnnnnnnnnnnnnnnnnnnnnnnnnnnnnnnnnnnnnnnnnnnnnnnnnnnnnnnnnnnnnnnnnnnnnnnnnnnnnnnnnnnnnnnnnnnnnnnnnnnnnnnnnnnnnnnnnnnnnnnnnnnnnnnnnnnnnnnnnnnnnnnnnnnnnnnnnnnnnnnnnnnnnnnnnnnnnnnnnnnnnnnnnnnnnnnnnnnnnnnnnnnnnnnnnnnnnnnnnnnnnnnnnnnnnnnnnnnnnnnnnnnnnnnnnnnnnnnnnnnnnnnnnnnnnnnnnnnnnnnnnnnnnnnnnnnnnnnnnnnnnnnnnnnnnnnnnnnnnnnnnnnnnnnnnnnnnnnnnnnnnnnnnnnnnnnnnnnnnnnnnnnnnnnnnnnnnnnnnnnnnnnnnnnnnnnnnnnnnnnnnnnnnnnnnnnnnnnnnnnnnnnnnnnnnnnnnnnnnnnnnnnnnnnnnnnnnnnnnnnnnnnnnnnnnnnnnnnnnnnnnnnnnnnnnnnnnnnnnnnnnnnnnnnnnnnnnnnnnnnnnnnnnnnnnnnnnnnnnnnnnnnnnnnnnnnnnnnnnnnnnnnnnnnnnnnnnnnnnnnnnnnnnnnnnnnnnnnnnnnnnnnnnnnnnnnnnnnnnnnnnnnnnnnnnnnnnnnnnnnnnnnnnnnnnnnnnnnnnnnnnnnnnnnnnnnnnnnnnnnnnnnnnnnnnnnnnnnnnnnnnnnnnnnnnnnnnnnnnnnnnnnnnnnnnnnnnnnnnnnnnnnnnnnnnnnnnnnnnnnnnnnnnnnnnnnnnnnnnnnnnnnnnnnnnnnnnnnnnnnnnnnnnnnnnnnnnnnnnnnnnnnnnnnnnnnnnnnnnnnnnnnnnnnnnnnnnnnnnnnnnnnnnnnnnnnnnnnnnnnnnnnnnnnnnnnnnnnnnnnnnnnnnnnnnnnnnnnnnnnnnnnnnnnnnnnnnnnnnnnnnnnnnnnnnnnnnnnnnnnnnnnnnnnnnnnnnnnnnnnnnnnnnnnnnnnnnnnnnnnnnnnnnnnnnnnnnnnnnnnnnnnnnnnnnnnnnnnnnnnnnnnnnnnnnnnnnnnnnnnnnnnnnnnnnnnnnnnnnnnnnnnnnnnnnnnnnnnnnnnnnnnnnnnnnnnnnnnnnnnnnnnnnnnnnnnnnnnnnnnnnnnnnnnnnnnnnnnnnnnnnnnnnnnnnnnnnnnnnnnnnnnnnnnnnnnnnnnnnnnnnnnnnnnnnnnnnnnnnnnnnnnnnnnnnnnnnnnnnnnnnnnnnnnnnnnnnnnnnnnnnnnnnnnnnnnnnnnnnnnnnnnnnnnnnnnnnnnnnnnnnnnnnnnnnnnnnnnnnnnnnnnnnnnnnnnnnnnnnnnnnnnnnnnnnnnnnnnnnnnnnnnnnnnnnnnnnnnnnnnnnnnnnnnnnnnnnnnnnnnnnnnnnnnnnnnnnnnnnnnnnnnnnnnnnnnnnnnnnnnnnnnnnnnnnnnnnnnnnnnnnnnnnnnnnnnnnnnnnnnnnnnnnnnnnnnnnnnnnnnnnnnnnnnnnnnnnnnnnnnnnnnnnnnnnnnnnnnnnnnnnnnnnnnnnnnnnnnnnnnnnnnnnnnnnnnnnnnnnnnnnnnnnnnnnnnnnnnnnnnnnnnnnnnnnnnnnnnnnnnnnnnnnnnnnnnnnnnnnnnnnnnnnnnnnnnnnnnnnnnnnnnnnnnnnnnnnnnnnnnnnnnnnnnnnnnnnnnnnnnnnnnnnnnnnnnnnnnnnnnnnnnnnnnnnnnnnnnnnnnnnnnnnnnnnnnnnnnnnnnnnnnnnnnnnnnnnnnnnnnnnnnnnnnnnnnnnnnnnnnnnnnnnnnnnnnnnnnnnnnnnnnnnnnnnnnnnnnnnnnnnnnnnnnnnnnnnnnnnnnnnnnnnnnnnnnnnnnnnnnnnnnnnnnnnnnnnnnnnnnnnnnnnnnnnnnnnnnnnnnnnnnnnnnnnnnnnnnnnnnnnnnnnnnnnnnnnnnnnnnnnnnnnnnnnnnnnnnnnnnnnnnnnnnnnnnnnnnnnnnnnnnnnnnnnnnnnnnnnnnnnnnnnnnnnnnnnnnnnnnnnnnnnnnnnnnnnnnnnnnnnnnnnnnnnnnnnnnnnnnnnnnnnnnnnnnnnnnnnnnnnnnnnnnnnnnnnnnnnnnnnnnnnnnnnnnnnnnnnnnnnnnnnnnnnnnnnnnnnnnnnnnnnnnnnnnnnnnnnnnnnnnnnnnnnnnnnnnnnnnnnnnnnnnnnnnnnnnnnnnnnnnnnnnnnnnnnnnnnnnnnnnnnnnnnnnnnnnnnnnnnnnnnnnnnnnnnnnnnnnnnnnnnnnnnnnnnnnnnnnnnnnnnnnnnnnnnnnnnnnnnnnnnnnnnnnnnnnnnnnnnnnnnnnnnnnnnnnnnnnnnnnnnnnnnnnnnnnnnnnnnnnnnnnnnnnnnnnnnnnnnnnnnnnnnnnnnnnnnnnnnnnnnnnnnnnnnnnnnnnnnnnnnnnnnnnnnnnnnnnnnnnnnnnnnnnnnnnnnnnnnnnnnnnnnnnnnnnnnnnnnnnnnnnnnnnnnnnnnnnnnnnnnnnnnnnnnnnnnnnnnnnnnnnnnnnnnnnnnnnnnnnnnnnnnnnnnnnnnnnnnnnnnnnnnnnnnnnnnnnnnnnnnnnnnnnnnnnnnnnnnnnnnnnnnnnnnnnnnnnnnnnnnnnnnnnnnnnnnnnnnnnnnnnnnnnnnnnnnnnnnnnnnnnnnnnnnnnnnnnnnnnnnnnnnnnnnnnnnnnnnnnnnnnnnnnnnnnnnnnnnnnnnnnnnnnnnnnnnnnnnnnnnnnnnnnnnnnnnnnnnnnnnnnnnnnnnnnnnnnnnnnnnnnnnnnnnnnnnnnnnnnnnnnnnnnnnnnnnnnnnnnnnnnnnnnnnnnnnnnnnnnnnnnnnnnnnnnnnnnnnnnnnnnnnnnnnnnnnnnnnnnnnnnnnnnnnnnnnnnnnnnnnnnnnnnnnnnnnnnnnnnnnnnnnnnnnnnnnnnnnnnnnnnnnnnnnnnnnnnnnnnnnnnnnnnnnnnnnnnnnnnnnnnnnnnnnnnnnnnnnnnnnnnnnnnnnnnnnnnnnnnnnnnnnnnnnnnnnnnnnnnnnnnnnnnnnnnnnnnnnnnnnnnnnnnnnnnnnnnnnnnnnnnnnnnnnnnnnnnnnnnnnnnnnnnnnnnnnnnnnnnnnnnnnnnnnnnnnnnnnnnnnnnnnnnnnnnnnnnnnnnnnnnnnnnnnnnnnnnnnnnnnnnnnnnnnnnnnnnnnnnnnnnnnnnnnnnnnnnnnnnnnnnnnnnnnnnnnnnnnnnnnnnnnnnnnnnnnnnnnnnnnnnnnnnnnnnnnnnnnnnnnnnnnnnnnnnnnnnnnnnnnnnnnnnnnnnnnnnnnnnnnnnnnnnnnnnnnnnnnnnnnnnnnnnnnnnnnnnnnnnnnnnnnnnnnnnnnnnnnnnnnnnnnnnnnnnnnnnnnnnnnnnnnnnnnnnnnnnnnnnnnnnnnnnnnnnnnnnnnnnnnnnnnnnnnnnnnnnnnnnnnnnnnnnnnnnnnnnnnnnnnnnnnnnnnnnnnnnnnnnnnnnnnnnnnnnnnnnnnnnnnnnnnnnnnnnnnnnnnnnnnnnnnnnnnnnnnnnnnnnnnnnnnnnnnnnnnnnnnnnnnnnnnnnnnnnnnnnnnnnnnnnnnnnnnnnnnnnnnnnnnnnnnnnnnnnnnnnnnnnnnnnnnnnnnnnnnnnnnnnnnnnnnnnnnnnnnnnnnnnnnnnnnnnnnnnnnnnnnnnnnnnnnnnnnnnnnnnnnnnnnnnnnnnnnnnnnnnnnnnnnnnnnnnnnnnnnnnnnnnnnnnnnnnnnnnnnnnnnnnnnnnnnnnnnnnnnnnnnnnnnnnnnnnnnnnnnnnnnnnnnnnnnnnnnnnnnnnnnnnnnnnnnnnnnnnnnnnnnnnnnnnnnnnnnnnnnnnnnnnnnnnnnnnnnnnnnnnnnnnnnnnnnnnnnnnnnnnnnnnnnnnnnnnnnnnnnnnnnnnnnnnnnnnnnnnnnnnnnnnnnnnnnnnnnnnnnnnnnnnnnnnnnnnnnnnnnnnnnnnnnnnnnnnnnnnnnnnnnnnnnnnnnnnnnnnnnnnnnnnnnnnnnnnnnnnnnnnnnnnnnnnnnnnnnnnnnnnnnnnnnnnnnnnnnnnnnnnnnnnnnnnnnnnnnnnnnnnnnnnnnnnnnnnnnnnnnnnnnnnnnnnnnnnnnnnnnnnnnnnnnnnnnnnnnnnnnnnnnnnnnnnnnnnnnnnnnnnnnnnnnnnnnnnnnnnnnnnnnnnnnnnnnnnnnnnnnnnnnnnnnnnnnnnnnnnnnnnnnnnnnnnnnnnnnnnnnnnnnnnnnnnnnnnnnnnnnnnnnnnnnnnnnnnnnnnnnnnnnnnnnnnnnnnnnnnnnnnnnnnnnnnnnnnnnnnnnnnnnnnnnnnnnnnnnnnnnnnnnnnnnnnnnnnnnnnnnnnnnnnnnnnnnnnnnnnnnnnnnnnnnnnnnnnnnnnnnnnnnnnnnnnnnnnnnnnnnnnnnnnnnnnnnnnnnnnnnnnnnnnnnnnnnnnnnnnnnnnnnnnnnnnnnnnnnnnnnnnnnnnnnnnnnnnnnnnnnnnnnnnnnnnnnnnnnnnnnnnnnnnnnnnnnnnnnnnnnnnnnnnnnnnnnnnnnnnnnnnnnnnnnnnnnnnnnnnnnnnnnnnnnnnnnnnnnnnnnnnnnnnnnnnnnnnnnnnnnnnnnnnnnnnnnnnnnnnnnnnnnnnnnnnnnnnnnnnnnnnnnnnnnnnnnnnnnnnnnnnnnnnnnnnnnnnnnnnnnnnnnnnnnnnnnnnnnnnnnnnnnnnnnnnnnnnnnnnnnnnnnnnnnnnnnnnnnnnnnnnnnnnnnnnnnnnnnnnnnnnnnnnnnnnnnnnnnnnnnnnnnnnnnnnnnnnnnnnnnnnnnnnnnnnnnnnnnnnnnnnnnnnnnnnnnnnnnnnnnnnnnnnnnnnnnnnnnnnnnnnnnnnnnnnnnnnnnnnnnnnnnnnnnnnnnnnnnnnnnnnnnnnnnnnnnnnnnnnnnnnnnnnnnnnnnnnnnnnnnnnnnnnnnnnnnnnnnnnnnnnnnnnnnnnnnnnnnnnnnnnnnnnnnnnnnnnnnnnnnnnnnnnnnnnnnnnnnnnnnnnnnnnnnnnnnnnnnnnnnnnnnnnnnnnnnnnnnnnnnnnnnnnnnnnnnnnnnnnnnnnnnnnnnnnnnnnnnnnnnnnnnnnnnnnnnnnnnnnnnnnnnnnnnnnnnnnnnnnnnnnnnnnnnnnnnnnnnnnnnnnnnnnnnnnnnnnnnnnnnnnnnnnnnnnnnnnnnnnnnnnnnnnnnnnnnnnnnnnnnnnnnnnnnnnnnnnnnnnnnnnnnnnnnnnnnnnnnnnnnnnnnnnnnnnnnnnnnnnnnnnnnnnnnnnnnnnnnnnnnnnnnnnnnnnnnnnnnnnnnnnnnnnnnnnnnnnnnnnnnnnnnnnnnnnnnnnnnnnnnnnnnnnnnnnnnnnnnnnnnnnnnnnnnnnnnnnnnnnnnnnnnnnnnnnnnnnnnnnnnnnnnnnnnnnnnnnnnnnnnnnnnnnnnnnnnnnnnnnnnnnnnnnnnnnnnnnnnnnnnnnnnnnnnnnnnnnnnnnnnnnnnnnnnnnnnnnnnnnnnnnnnnnnnnnnnnnnnnnnnnnnnnnnnnnnnnnnnnnnnnnnnnnnnnnnnnnnnnnnnnnnnnnnnnnnnnnnnnnnnnnnnnnnnnnnnnnnnnnnnnnnnnnnnnnnnnnnnnnnnnnnnnnnnnnnnnnnnnnnnnnnnnnnnnnnnnnnnnnnnnnnnnnnnnnnnnnnnnnnnnnnnnnnnnnnnnnnnnnnnnnnnnnnnnnnnnnnnnnnnnnnnnnnnnnnnnnnnnnnnnnnnnnnnnnnnnnnnnnnnnnnnnnnnnnnnnnnnnnnnnnnnnnnnnnnnnnnnnnnnnnnnnnnnnnnnnnnnnnnnnnnnnnnnnnnnnnnnnnnnnnnnnnnnnnnnnnnnnnnnnnnnnnnnnnnnnnnnnnnnnnnnnnnnnnnnnnnnnnnnnnnnnnnnnnnnnnnnnnnnnnnnnnnnnnnnnnnnnnnnnnnnnnnnnnnnnnnnnnnnnnnnnnnnnnnnnnnnnnnnnnnnnnnnnnnnnnnnnnnnnnnnnnnnnnnnnnnnnnnnnnnnnnnnnnnnnnnnnnnnnnnnnnnnnnnnnnnnnnnnnnnnnnnnnnnnnnnnnnnnnnnnnnnnnnnnnnnnnnnnnnnnnnnnnnnnnnnnnnnnnnnnnnnnnnnnnnnnnnnnnnnnnnnnnnnnnnnnnnnnnnnnnnnnnnnnnnnnnnnnnnnnnnnnnnnnnnnnnnnnnnnnnnnnnnnnnnnnnnnnnnnnnnnnnnnnnnnnnnnnnnnnnnnnnnnnnnnnnnnnnnnnnnnnnnnnnnnnnnnnnnnnnnnnnnnnnnnnnnnnnnnnnnnnnnnnnnnnnnnnnnnnnnnnnnnnnnnnnnnnnnnnnnnnnnnnnnnnnnnnnnnnnnnnnnnnnnnnnnnnnnnnnnnnnnnnnnnnnnnnnnnnnnnnnnnnnnnnnnnnnnnnnnnnnnnnnnnnnnnnnnnnnnnnnnnnnnnnnnnnnnnnnnnnnnnnnnnnnnnnnnnnnnnnnnnnnnnnnnnnnnnnnnnnnnnnnnnnnnnnnnnnnnnnnnnnnnnnnnnnnnnnnnnnnnnnnnnnnnnnnnnnnnnnnnnnnnnnnnnnnnnnnnnnnnnnnnnnnnnnnnnnnnnnnnnnnnnnnnnnnnnnnnnnnnnnnnnnnnnnnnnnnnnnnnnnnnnnnnnnnnnnnnnnnnnnnnnnnnnnnnnnnnnnnnnnnnnnnnnnnnnnnnnnnnnnnnnnnnnnnnnnnnnnnnnnnnnnnnnnnnnnnnnnnnnnnnnnnnnnnnnnnnnnnnnnnnnnnnnnnnnnnnnnnnnnnnnnnnnnnnnnnnnnnnnnnnnnnnnnnnnnnnnnnnnnnnnnnnnnnnnnnnnnnnnnnnnnnnnnnnnnnnnnnnnnnnnnnnnnnnnnnnnnnnnnnnnnnnnnnnnnnnnnnnnnnnnnnnnnnnnnnnnnnnnnnnnnnnnnnnnnnnnnnnnnnnnnnnnnnnnnnnnnnnnnnnnnnnnnnnnnnnnnnnnnnnnnnnnnnnnnnnnnnnnnnnnnnnnnnnnnnnnnnnnnnnnnnnnnnnnnnnnnnnnnnnnnnnnnnnnnnnnnnnnnnnnnnnnnnnnnnnnnnnnnnnnnnnnnnnnnnnnnnnnnnnnnnnnnnnnnnnnnnnnnnnnnnnnnnnnnnnnnnnnnnnnnnnnnnnnnnnnnnnnnnnnnnnnnnnnnnnnnnnnnnnnnnnnnnnnnnnnnnnnnnnnnnnnnnnnnnnnnnnnnnnnnnnnnnnnnnnnnnnnnnnnnnnnnnnnnnnnnnnnnnnnnnnnnnnnnnnnnnnnnnnnnnnnnnnnnnnnnnnnnnnnnnnnnnnnnnnnnnnnnnnnnnnnnnnnnnnnnnnnnnnnnnnnnnnnnnnnnnnnnnnnnnnnnnnnnnnnnnnnnnnnnnnnnnnnnnnnnnnnnnnnnnnnnnnnnnnnnnnnnnnnnnnnnnnnnnnnnnnnnnnnnnnnnnnnnnnnnnnnnnnnnnnnnnnnnnnnnnnnnnnnnnnnnnnnnnnnnnnnnnnnnnnnnnnnnnnnnnnnnnnnnnnnnnnnnnnnnnnnnnnnnnnnnnnnnnnnnnnnnnnnnnnnnnnnnnnnnnnnnnnnnnnnnnnnnnnnnnnnnnnnnnnnnnnnnnnnnnnnnnnnnnnnnnnnnnnnnnnnnnnnnnnnnnnnnnnnnnnnnnnnnnnnnnnnnnnnnnnnnnnnnnnnnnnnnnnnnnnnnnnnnnnnnnnnnnnnnnnnnnnnnnnnnnnnnnnnnnnnnnnnnnnnnnnnnnnnnnnnnnnnnnnnnnnnnnnnnnnnnnnnnnnnnnnnnnnnnnnnnnnnnnnnnnnnnnnnnnnnnnnnnnnnnnnnnnnnnnnnnnnnnnnnnnnnnnnnnnnnnnnnnnnnnnnnnnnnnnnnnnnnnnnnnnnnnnnnnnnnnnnnnnnnnnnnnnnnnnnnnnnnnnnnnnnnnnnnnnnnnnnnnnnnnnnnnnnnnnnnnnnnnnnnnnnnnnnnnnnnnnnnnnnnnnnnnnnnnnnnnnnnnnnnnnnnnnnnnnnnnnnnnnnnnnnnnnnnnnnnnnnnnnnnnnnnnnnnnnnnnnnnnnnnnnnnnnnnnnnnnnnnnnnnnnnnnnnnnnnnnnnnnnnnnnnnnnnnnnnnnnnnnnnnnnnnnnnnnnnnnnnnnnnnnnnnnnnnnnnnnnnnnnnnnnnnnnnnnnnnnnnnnnnnnnnnnnnnnnnnnnnnnnnnnnnnnnnnnnnnnnnnnnnnnnnnnnnnnnnnnnnnnnnnnnnnnnnnnnnnnnnnnnnnnnnnnnnnnnnnnnnnnnnnnnnnnnnnnnnnnnnnnnnnnnnnnnnnnnnnnnnnnnnnnnnnnnnnnnnnnnnnnnnnnnnnnnnnnnnnnnnnnnnnnnnnnnnnnnnnnnnnnnnnnnnnnnnnnnnnnnnnnnnnnnnnnnnnnnnnnnnnnnnnnnnnnnnnnnnnnnnnnnnnnnnnnnnnnnnnnnnnnnnnnnnnnnnnnnnnnnnnnnnnnnnnnnnnnnnnnnnnnnnnnnnnnnnnnnnnnnnnnnnnnnnnnnnnnnnnnnnnnnnnnnnnnnnnnnnnnnnnnnnnnnnnnnnnnnnnnnnnnnnnnnnnnnnnnnnnnnnnnnnnnnnnnnnnnnnnnnnnnnnnnnnnnnnnnnnnnnnnnnnnnnnnnnnnnnnnnnnnnnnnnnnnnnnnnnnnnnnnnnnnnnnnnnnnnnnnnnnnnnnnnnnnnnnnnnnnnnnnnnnnnnnnnnnnnnnnnnnnnnnnnnnnnnnnnnnnnnnnnnnnnnnnnnnnnnnnnnnnnnnnnnnnnnnnnnnnnnnnnnnnnnnnnnnnnnnnnnnnnnnnnnnnnnnnnnnnnnnnnnnnnnnnnnnnnnnnnnnnnnnnnnnnnnnnnnnnnnnnnnnnnnnnnnnnnnnnnnnnnnnnnnnnnnnnnnnnnnnnnnnnnnnnnnnnnnnnnnnnnnnnnnnnnnnnnnnnnnnnnnnnnnnnnnnnnnnnnnnnnnnnnnnnnnnnnnnnnnnnnnnnnnnnnnnnnnnnnnnnnnnnnnnnnnnnnnnnnnnnnnnnnnnnnnnnnnnnnnnnnnnnnnnnnnnnnnnnnnnnnnnnnnnnnnnnnnnnnnnnnnnnnnnnnnnnnnnnnnnnnnnnnnnnnnnnnnnnnnnnnnnnnnnnnnnnnnnnnnnnnnnnnnnnnnnnnnnnnnnnnnnnnnnnnnnnnnnnnnnnnnnnnnnnnnnnnnnnnnnnnnnnnnnnnnnnnnnnnnnnnnnnnnnnnnnnnnnnnnnnnnnnnnnnnnnnnnnnnnnnnnnnnnnnnnnnnnnnnnnnnnnnnnnnnnnnnnnnnnnnnnnnnnnnnnnnnnnnnnnnnnnnnnnnnnnnnnnnnnnnnnnnnnnnnnnnnnnnnnnnnnnnnnnnnnnnnnnnnnnnnnnnnnnnnnnnnnnnnnnnnnnnnnnnnnnnnnnnnnnnnnnnnnnnnnnnnnnnnnnnnnnnnnnnnnnnnnnnnnnnnnnnnnnnnnnnnnnnnnnnnnnnnnnnnnnnnnnnnnnnnnnnnnnnnnnnnnnnnnnnnnnnnnnnnnnnnnnnnnnnnnnnnnnnnnnnnnnnnnnnnnnnnnnnnnnnnnnnnnnnnnnnnnnnnnnnnnnnnnnnnnnnnnnnnnnnnnnnnnnnnnnnnnnnnnnnnnnnnnnnnnnnnnnnnnnnnnnnnnnnnnnnnnnnnnnnnnnnnnnnnnnnnnnnnnnnnnnnnnnnnnnnnnnnnnnnnnnnnnnnnnnnnnnnnnnnnnnnnnnnnnnnnnnnnnnnnnnnnnnnnnnnnnnnnnnnnnnnnnnnnnnnnnnnnnnnnnnnnnnnnnnnnnnnnnnnnnnnnnnnnnnnnnnnnnnnnnnnnnnnnnnnnnnnnnnnnnnnnnnnnnnnnnnnnnnnnnnnnnnnnnnnnnnnnnnnnnnnnnnnnnnnnnnnnnnnnnnnnnnnnnnnnnnnnnnnnnnnnnnnnnnnnnnnnnnnnnnnnnnnnnnnnnnnnnnnnnnnnnnnnnnnnnnnnnnnnnnnnnnnnnnnnnnnnnnnnnnnnnnnnnnnnnnnnnnnnnnnnnnnnnnnnnnnnnnnnnnnnnnnnnnnnnnnnnnnnnnnnnnnnnnnnnnnnnnnnnnnnnnnnnnnnnnnnnnnnnnnnnnnnnnnnnnnnnnnnnnnnnnnnnnnnnnnnnnnnnnnnnnnnnnnnnnnnnnnnnnnnnnnnnnnnnnnnnnnnnnnnnnnnnnnnnnnnnnnnnnnnnnnnnnnnnnnnnnnnnnnnnnnnnnnnnnnnnnnnnnnnnnnnnnnnnnnnnnnnnnnnnnnnnnnnnnnnnnnnnnnnnnnnnnnnnnnnnnnnnnnnnnnnnnnnnnnnnnnnnnnnnnnnnnnnnnnnnnnnnnnnnnnnnnnnnnnnnnnnnnnnnnnnnnnnnnnnnnnnnnnnnnnnnnnnnnnnnnnnnnnnnnnnnnnnnnnnnnnnnnnnnnnnnnnnnnnnnnnnnnnnnnnnnnnnnnnnnnnnnnnnnnnnnnnnnnnnnnnnnnnnnnnnnnnnnnnnnnnnnnnnnnnnnnnnnnnnnnnnnnnnnnnnnnnnnnnnnnnnnnnnnnnnnnnnnnnnnnnnnnnnnnnnnnnnnnnnnnnnnnnnnnnnnnnnnnnnnnnnnnnnnnnnnnnnnnnnnnnnnnnnnnnnnnnnnnnnnnnnnnnnnnnnnnnnnnnnnnnnnnnnnnnnnnnnnnnnnnnnnnnnnnnnnnnnnnnnnnnnnnnnnnnnnnnnnnnnnnnnnnnnnnnnnnnnnnnnnnnnnnnnnnnnnnnnnnnnnnnnnnnnnnnnnnnnnnnnnnnnnnnnnnnnnnnnnnnnnnnnnnnnnnnnnnnnnnnnnnnnnnnnnnnnnnnnnnnnnnnnnnnnnnnnnnnnnnnnnnnnnnnnnnnnnnnnnnnnnnnnnnnnnnnnnnnnnnnnnnnnnnnnnnnnnnnnnnnnnnnnnnnnnnnnnnnnnnnnnnnnnnnnnnnnnnnnnnnnnnnnnnnnnnnnnnnnnnnnnnnnnnnnnnnnnnnnnnnnnnnnnnnnnnnnnnnnnnnnnnnnnnnnnnnnnnnnnnnnnnnnnnnnnnnnnnnnnnnnnnnnnnnnnnnnnnnnnnnnnnnnnnnnnnnnnnnnnnnnnnnnnnnnnnnnnnnnnnnnnnnnnnnnnnnnnnnnnnnnnnnnnnnnnnnnnnnnnnnnnnnnnnnnnnnnnnnnnnnnnnnnnnnnnnnnnnnnnnnnnnnnnnnnnnnnnnnnnnnnnnnnnnnnnnnnnnnnnnnnnnnnnnnnnnnnnnnnnnnnnnnnnnnnnnnnnnnnnnnnnnnnnnnnnnnnnnnnnnnnnnnnnnnnnnnnnnnnnnnnnnnnnnnnnnnnnnnnnnnnnnnnnnnnnnnnnnnnnnnnnnnnnnnnnnnnnnnnnnnnnnnnnnnnnnnnnnnnnnnnnnnnnnnnnnnnnnnnnnnnnnnnnnnnnnnnnnnnnnnnnnnnnnnnnnnnnnnnnnnnnnnnnnnnnnnnnnnnnnnnnnnnnnnnnnnnnnnnnnnnnnnnnnnnnnnnnnnnnnnnnnnnnnnnnnnnnnnnnnnnnnnnnnnnnnnnnnnnnnnnnnnnnnnnnnnnnnnnnnnnnnnnnnnnnnnnnnnnnnnnnnnnnnnnnnnnnnnnnnnnnnnnnnnnnnnnnnnnnnnnnnnnnnnnnnnnnnnnnnnnnnnnnnnnnnnnnnnnnnnnnnnnnnnnnnnnnnnnnnnnnnnnnnnnnnnnnnnnnnnnnnnnnnnnnnnnnnnnnnnnnnnnnnnnnnnnnnnnnnnnnnnnnnnnnnnnnnnnnnnnnnnnnnnnnnnnnnnnnnnnnnnnnnnnnnnnnnnnnnnnnnnnnnnnnnnnnnnnnnnnnnnnnnnnnnnnnnnnnnnnnnnnnnnnnnnnnnnnnnnnnnnnnnnnnnnnnnnnnnnnnnnnnnnnnnnnnnnnnnnnnnnnnnnnnnnnnnnnnnnnnnnnnnnnnnnnnnnnnnnnnnnnnnnnnnnnnnnnnnnnnnnnnnnnnnnnnnnnnnnnnnnnnnnnnnnnnnnnnnnnnnnnnnnnnnnnnnnnnnnnnnnnnnnnnnnnnnnnnnnnnnnnnnnnnnnnnnnnnnnnnnnnnnnnnnnnnnnnnnnnnnnnnnnnnnnnnnnnnnnnnnnnnnnnnnnnnnnnnnnnnnnnnnnnnnnnnnnnnnnnnnnnnnnnnnnnnnnnnnnnnnnnnnnnnnnnnnnnnnnnnnnnnnnnnnnnnnnnnnnnnnnnnnnnnnnnnnnnnnnnnnnnnnnnnnnnnnnnnnnnnnnnnnnnnnnnnnnnnnnnnnnnnnnnnnnnnnnnnnnnnnnnnnnnnnnnnnnnnnnnnnnnnnnnnnnnnnnnnnnnnnnnnnnnnnnnnnnnnnnnnnnnnnnnnnnnnnnnnnnnnnnnnnnnnnnnnnnnnnnnnnnnnnnnnnnnnnnnnnnnnnnnnnnnnnnnnnnnnnnnnnnnnnnnnnnnnnnnnnnnnnnnnnnnnnnnnnnnnnnnnnnnnnnnnnnnnnnnnnnnnnnnnnnnnnnnnnnnnnnnnnnnnnnnnnnnnnnnnnnnnnnnnnnnnnnnnnnnnnnnnnnnnnnnnnnnnnnnnnnnnnnnnnnnnnnnnnnnnnnnnnnnnnnnnnnnnnnnnnnnnnnnnnnnnnnnnnnnnnnnnnnnnnnnnnnnnnnnnnnnnnnnnnnnnnnnnnnnnnnnnnnnnnnnnnnnnnnnnnnnnnnnnnnnnnnnnnnnnnnnnnnnnnnnnnnnnnnnnnnnnnnnnnnnnnnnnnnnnnnnnnnnnnnnnnnnnnnnnnnnnnnnnnnnnnnnnnnnnnnnnnnnnnnnnnnnnnnnnnnnnnnnnnnnnnnnnnnnnnnnnnnnnnnnnnnnnnnnnnnnnnnnnnnnnnnnnnnnnnnnnnnnnnnnnnnnnnnnnnnnnnnnnnnnnnnnnnnnnnnnnnnnnnnnnnnnnnnnnnnnnnnnnnnnnnnnnnnnnnnnnnnnnnnnnnnnnnnnnnnnnnnnnnnnnnnnnnnnnnnnnnnnnnnnnnnnnnnnnnnnnnnnnnnnnnnnnnnnnnnnnnnnnnnnnnnnnnnnnnnnnnnnnnnnnnnnnnnnnnnnnnnnnnnnnnnnnnnnnnnnnnnnnnnnnnnnnnnnnnnnnnnnnnnnnnnnnnnnnnnnnnnnnnnnnnnnnnnnnnnnnnnnnnnnnnnnnnnnnnnnnnnnnnnnnnnnnnnnnnnnnnnnnnnnnnnnnnnnnnnnnnnnnnnnnnnnnnnnnnnnnnnnnnnnnnnnnnnnnnnnnnnnnnnnnnnnnnnnnnnnnnnnnnnnnnnnnnnnnnnnnnnnnnnnnnnnnnnnnnnnnnnnnnnnnnnnnnnnnnnnnnnnnnnnnnnnnnnnnnnnnnnnnnnnnnnnnnnnnnnnnnnnnnnnnnnnnnnnnnnnnnnnnnnnnnnnnnnnnnnnnnnnnnnnnnnnnnnnnnnnnnnnnnnnnnnnnnnnnnnnnnnnnnnnnnnnnnnnnnnnnnnnnnnnnnnnnnnnnnnnnnnnnnnnnnnnnnnnnnnnnnnnnnnnnnnnnnnnnnnnnnnnnnnnnnnnnnnnnnnnnnnnnnnnnnnnnnnnnnnnnnnnnnnnnnnnnnnnnnnnnnnnnnnnnnnnnnnnnnnnnnnnnnnnnnnnnnnnnnnnnnnnnnnnnnnnnnnnnnnnnnnnnnnnnnnnnnnnnnnnnnnnnnnnnnnnnnnnnnnnnnnnnnnnnnnnnnnnnnnnnnnnnnnnnnnnnnnnnnnnnnnnnnnnnnnnnnnnnnnnnnnnnnnnnnnnnnnnnnnnnnnnnnnnnnnnnnnnnnnnnnnnnnnnnnnnnnnnnnnnnnnnnnnnnnnnnnnnnnnnnnnnnnnnnnnnnnnnnnnnnnnnnnnnnnnnnnnnnnnnnnnnnnnnnnnnnnnnnnnnnnnnnnnnnnnnnnnnnnnnnnnnnnnnnnnnnnnnnnnnnnnnnnnnnnnnnnnnnnnnnnnnnnnnnnnnnnnnnnnnnnnnnnnnnnnnnnnnnnnnnnnnnnnnnnnnnnnnnnnnnnnnnnnnnnnnnnnnnnnnnnnnnnnnnnnnnnnnnnnnnnnnnnnnnnnnnnnnnnnnnnnnnnnnnnnnnnnnnnnnnnnnnnnnnnnnnnnnnnnnnnnnnnnnnnnnnnnnnnnnnnnnnnnnnnnnnnnnnnnnnnnnnnnnnnnnnnnnnnnnnnnnnnnnnnnnnnnnnnnnnnnnnnnnnnnnnnnnnnnnnnnnnnnnnnnnnnnnnnnnnnnnnnnnnnnnnnnnnnnnnnnnnnnnnnnnnnnnnnnnnnnnnnnnnnnnnnnnnnnnnnnnnnnnnnnnnnnnnnnnnnnnnnnnnnnnnnnnnnnnnnnnnnnnnnnnnnnnnnnnnnnnnnnnnnnnnnnnnnnnnnnnnnnnnnnnnnnnnnnnnnnnnnnnnnnnnnnnnnnnnnnnnnnnnnnnnnnnnnnnnnnnnnnnnnnnnnnnnnnnnnnnnnnnnnnnnnnnnnnnnnnnnnnnnnnnnnnnnnnnnnnnnnnnnnnnnnnnnnnnnnnnnnnnnnnnnnnnnnnnnnnnnnnnnnnnnnnnnnnnnnnnnnnnnnnnnnnnnnnnnnnnnnnnnnnnnnnnnnnnnnnnnnnnnnnnnnnnnnnnnnnnnnnnnnnnnnnnnnnnnnnnnnnnnnnnnnnnnnnnnnnnnnnnnnnnnnnnnnnnnnnnnnnnnnnnnnnnnnnnnnnnnnnnnnnnnnnnnnnnnnnnnnnnnnnnnnnnnnnnnnnnnnnnnnnnnnnnnnnnnnnnnnnnnnnnnnnnnnnnnnnnnnnnnnnnnnnnnnnnnnnnnnnnnnnnnnnnnnnnnnnnnnnnnnnnnnnnnnnnnnnnnnnnnnnnnnnnnnnnnnnnnnnnnnnnnnnnnnnnnnnnnnnnnnnnnnnnnnnnnnnnnnnnnnnnnnnnnnnnnnnnnnnnnnnnnnnnnnnnnnnnnnnnnnnnnnnnnnnnnnnnnnnnnnnnnnnnnnnnnnnnnnnnnnnnnnnnnnnnnnnnnnnnnnnnnnnnnnnnnnnnnnnnnnnnnnnnnnnnnnnnnnnnnnnnnnnnnnnnnnnnnnnnnnnnnnnnnnnnnnnnnnnnnnnnnnnnnnnnnnnnnnnnnnnnnnnnnnnnnnnnnnnnnnnnnnnnnnnnnnnnnnnnnnnnnnnnnnnnnnnnnnnnnnnnnnnnnnnnnnnnnnnnnnnnnnnnnnnnnnnnnnnnnnnnnnnnnnnnnnnnnnnnnnnnnnnnnnnnnnnnnnnnnnnnnnnnnnnnnnnnnnnnnnnnnnnnnnnnnnnnnnnnnnnnnnnnnnnnnnnnnnnnnnnnnnnnnnnnnnnnnnnnnnnnnnnnnnnnnnnnnnnnnnnnnnnnnnnnnnnnnnnnnnnnnnnnnnnnnnnnnnnnnnnnnnnnnnnnnnnnnnnnnnnnnnnnnnnnnnnnnnnnnnnnnnnnnnnnnnnnnnnnnnnnnnnnnnnnnnnnnnnnnnnnnnnnnnnnnnnnnnnnnnnnnnnnnnnnnnnnnnnnnnnnnnnnnnnnnnnnnnnnnnnnnnnnnnnnnnnnnnnnnnnnnnnnnnnnnnnnnnnnnnnnnnnnnnnnnnnnnnnnnnnnnnnnnnnnnnnnnnnnnnnnnnnnnnnnnnnnnnnnnnnnnnnnnnnnnnnnnnnnnnnnnnnnnnnnnnnnnnnnnnnnnnnnnnnnnnnnnnnnnnnnnnnnnnnnnnnnnnnnnnnnnnnnnnnnnnnnnnnnnnnnnnnnnnnnnnnnnnnnnnnnnnnnnnnnnnnnnnnnnnnnnnnnnnnnnnnnnnnnnnnnnnnnnnnnnnnnnnnnnnnnnnnnnnnnnnnnnnnnnnnnnnnnnnnnnnnnnnnnnnnnnnnnnnnnnnnnnnnnnnnnnnnnnnnnnnnnnnnnnnnnnnnnnnnnnnnnnnnnnnnnnnnnnnnnnnnnnnnnnnnnnnnnnnnnnnnnnnnnnnnnnnnnnnnnnnnnnnnnnnnnnnnnnnnnnnnnnnnnnnnnnnnnnnnnnnnnnnnnnnnnnnnnnnnnnnnnnnnnnnnnnnnnnnnnnnnnnnnnnnnnnnnnnnnnnnnnnnnnnnnnnnnnnnnnnnnnnnnnnnnnnnnnnnnnnnnnnnnnnnnnnnnnnnnnnnnnnnnnnnnnnnnnnnnnnnnnnnnnnnnnnnnnnnnnnnnnnnnnnnnnnnnnnnnnnnnnnnnnnnnnnnnnnnnnnnnnnnnnnnnnnnnnnnnnnnnnnnnnnnnnnnnnnnnnnnnnnnnnnnnnnnnnnnnnnnnnnnnnnnnnnnnnnnnnnnnnnnnnnnnnnnnnnnnnnnnnnnnnnnnnnnnnnnnnnnnnnnnnnnnnnnnnnnnnnnnnnnnnnnnnnnnnnnnnnnnnnnnnnnnnnnnnnnnnnnnnnnnnnnnnnnnnnnnnnnnnnnnnnnnnnnnnnnnnnnnnnnnnnnnnnnnnnnnnnnnnnnnnnnnnnnnnnnnnnnnnnnnnnnnnnnnnnnnnnnnnnnnnnnnnnnnnnnnnnnnnnnnnnnnnnnnnnnnnnnnnnnnnnnnnnnnnnnnnnnnnnnnnnnnnnnnnnnnnnnnnnnnnnnnnnnnnnnnnnnnnnnnnnnnnnnnnnnnnnnnnnnnnnnnnnnnnnnnnnnnnnnnnnnnnnnnnnnnnnnnnnnnnnnnnnnnnnnnnnnnnnnnnnnnnnnnnnnnnnnnnnnnnnnnnnnnnnnnnnnnnnnnnnnnnnnnnnnnnnnnnnnnnnnnnnnnnnnnnnnnnnnnnnnnnnnnnnnnnnnnnnnnnnnnnnnnnnnnnnnnnnnnnnnnnnnnnnnnnnnnnnnnnnnnnnnnnnnnnnnnnnnnnnnnnnnnnnnnnnnnnnnnnnnnnnnnnnnnnnnnnnnnnnnnnnnnnnnnnnnnnnnnnnnnnnnnnnnnnnnnnnnnnnnnnnnnnnnnnnnnnnnnnnnnnnnnnnnnnnnnnnnnnnnnnnnnnnnnnnnnnnnnnnnnnnnnnnnnnnnnnnnnnnnnnnnnnnnnnnnnnnnnnnnnnnnnnnnnnnnnnnnnnnnnnnnnnnnnnnnnnnnnnnnnnnnnnnnnnnnnnnnnnnnnnnnnnnnnnnnnnnnnnnnnnnnnnnnnnnnnnnnnnnnnnnnnnnnnnnnnnnnnnnnnnnnnnnnnnnnnnnnnnnnnnnnnnnnnnnnnnnnnnnnnnnnnnnnnnnnnnnnnnnnnnnnnnnnnnnnnnnnnnnnnnnnnnnnnnnnnnnnnnnnnnnnnnnnnnnnnnnnnnnnnnnnnnnnnnnnnnnnnnnnnnnnnnnnnnnnnnnnnnnnnnnnnnnnnnnnnnnnnnnnnnnnnnnnnnnnnnnnnnnnnnnnnnnnnnnnnnnnnnnnnnnnnnnnnnnnnnnnnnnnnnnnnnnnnnnnnnnnnnnnnnnnnnnnnnnnnnnnnnnnnnnnnnnnnnnnnnnnnnnnnnnnnnnnnnnnnnnnnnnnnnnnnnnnnnnnnnnnnnnnnnnnnnnnnnnnnnnnnnnnnnnnnnnnnnnnnnnnnnnnnnnnnnnnnnnnnnnnnnnnnnnnnnnnnnnnnnnnnnnnnnnnnnnnnnnnnnnnnnnnnnnnnnnnnnnnnnnnnnnnnnnnnnnnnnnnnnnnnnnnnnnnnnnnnnnnnnnnnnnnnnnnnnnnnnnnnnnnnnnnnnnnnnnnnnnnnnnnnnnnnnnnnnnnnnnnnnnnnnnnnnnnnnnnnnnnnnnnnnnnnnnnnnnnnnnnnnnnnnnnnnnnnnnnnnnnnnnnnnnnnnnnnnnnnnnnnnnnnnnnnnnnnnnnnnnnnnnnnnnnnnnnnnnnnnnnnnnnnnnnnnnnnnnnnnnnnnnnnnnnnnnnnnnnnnnnnnnnnnnnnnnnnnnnnnnnnnnnnnnnnnnnnnnnnnnnnnnnnnnnnnnnnnnnnnnnnnnnnnnnnnnnnnnnnnnnnnnnnnnnnnnnnnnnnnnnnnnnnnnnnnnnnnnnnnnnnnnnnnnnnnnnnnnnnnnnnnnnnnnnnnnnnnnnnnnnnnnnnnnnnnnnnnnnnnnnnnnnnnnnnnnnnnnnnnnnnnnnnnnnnnnnnnnnnnnnnnnnnnnnnnnnnnnnnnnnnnnnnnnnnnnnnnnnnnnnnnnnnnnnnnnnnnnnnnnnnnnnnnnnnnnnnnnnnnnnnnnnnnnnnnnnnnnnnnnnnnnnnnnnnnnnnnnnnnnnnnnnnnnnnnnnnnnnnnnnnnnnnnnnnnnnnnnnnnnnnnnnnnnnnnnnnnnnnnnnnnnnnnnnnnnnnnnnnnnnnnnnnnnnnnnnnnnnnnnnnnnnnnnnnnnnnnnnnnnnnnnnnnnnnnnnnnnnnnnnnnnnnnnnnnnnnnnnnnnnnnnnnnnnnnnnnnnnnnnnnnnnnnnnnnnnnnnnnnnnnnnnnnnnnnnnnnnnnnnnnnnnnnnnnnnnnnnnnnnnnnnnnnnnnnnnnnnnnnnnnnnnnnnnnnnnnnnnnnnnnnnnnnnnnnnnnnnnnnnnnnnnnnnnnnnnnnnnnnnnnnnnnnnnnnnnnnnnnnnnnnnnnnnnnnnnnnnnnnnnnnnnnnnnnnnnnnnnnnnnnnnnnnnnnnnnnnnnnnnnnnnnnnnnnnnnnnnnnnnnnnnnnnnnnnnnnnnnnnnnnnnnnnnnnnnnnnnnnnnnnnnnnnnnnnnnnnnnnnnnnnnnnnnnnnnnnnnnnnnnnnnnnnnnnnnnnnnnnnnnnnnnnnnnnnnnnnnnnnnnnnnnnnnnnnnnnnnnnnnnnnnnnnnnnnnnnnnnnnnnnnnnnnnnnnnnnnnnnnnnnnnnnnnnnnnnnnnnnnnnnnnnnnnnnnnnnnnnnnnnnnnnnnnnnnnnnnnnnnnnnnnnnnnnnnnnnnnnnnnnnnnnnnnnnnnnnnnnnnnnnnnnnnnnnnnnnnnnnnnnnnnnnnnnnnnnnnnnnnnnnnnnnnnnnnnnnnnnnnnnnnnnnnnnnnnnnnnnnnnnnnnnnnnnnnnnnnnnnnnnnnnnnnnnnnnnnnnnnnnnnnnnnnnnnnnnnnnnnnnnnnnnnnnnnnnnnnnnnnnnnnnnnnnnnnnnnnnnnnnnnnnnnnnnnnnnnnnnnnnnnnnnnnnnnnnnnnnnnnnnnnnnnnnnnnnnnnnnnnnnnnnnnnnnnnnnnnnnnnnnnnnnnnnnnnnnnnnnnnnnnnnnnnnnnnnnnnnnnnnnnnnnnnnnnnnnnnnnnnnnnnnnnnnnnnnnnnnnnnnnnnnnnnnnnnnnnnnnnnnnnnnnnnnnnnnnnnnnnnnnnnnnnnnnnnnnnnnnnnnnnnnnnnnnnnnnnnnnnnnnnnnnnnnnnnnnnnnnnnnnnnnnnnnnnnnnnnnnnnnnnnnnnnnnnnnnnnnnnnnnnnnnnnnnnnnnnnnnnnnnnnnnnnnnnnnnnnnnnnnnnnnnnnnnnnnnnnnnnnnnnnnnnnnnnnnnnnnnnnnnnnnnnnnnnnnnnnnnnnnnnnnnnnnnnnnnnnnnnnnnnnnnnnnnnnnnnnnnnnnnnnnnnnnnnnnnnnnnnnnnnnnnnnnnnnnnnnnnnnnnnnnnnnnnnnnnnnnnnnnnnnnnnnnnnnnnnnnnnnnnnnnnnnnnnnnnnnnnnnnnnnnnnnnnnnnnnnnnnnnnnnnnnnnnnnnnnnnnnnnnnnnnnnnnnnnnnnnnnnnnnnnnnnnnnnnnnnnnnnnnnnnnnnnnnnnnnnnnnnnnnnnnnnnnnnnnnnnnnnnnnnnnnnnnnnnnnnnnnnnnnnnnnnnnnnnnnnnnnnnnnnnnnnnnnnnnnnnnnnnnnnnnnnnnnnnnnnnnnnnnnnnnnnnnnnnnnnnnnnnnnnnnnnnnnnnnnnnnnnnnnnnnnnnnnnnnnnnnnnnnnnnnnnnnnnnnnnnnnnnnnnnnnnnnnnnnnnnnnnnnnnnnnnnnnnnnnnnnnnnnnnnnnnnnnnnnnnnnnnnnnnnnnnnnnnnnnnnnnnnnnnnnnnnnnnnnnnnnnnnnnnnnnnnnnnnnnnnnnnnnnnnnnnnnnnnnnnnnnnnnnnnnnnnnnnnnnnnnnnnnnnnnnnnnnnnnnnnnnnnnnnnnnnnnnnnnnnnnnnnnnnnnnnnnnnnnnnnnnnnnnnnnnnnnnnnnnnnnnnnnnnnnnnnnnnnnnnnnnnnnnnnnnnnnnnnnnnnnnnnnnnnnnnnnnnnnnnnnnnnnnnnnnnnnnnnnnnnnnnnnnnnnnnnnnnnnnnnnnnnnnnnnnnnnnnnnnnnnnnnnnnnnnnnnnnnnnnnnnnnnnnnnnnnnnnnnnnnnnnnnnnnnnnnnnnnnnnnnnnnnnnnnnnnnnnnnnnnnnnnnnnnnnnnnnnnnnnnnnnnnnnnnnnnnnnnnnnnnnnnnnnnnnnnnnnnnnnnnnnnnnnnnnnnnnnnnnnnnnnnnnnnnnnnnnnnnnnnnnnnnnnnnnnnnnnnnnnnnnnnnnnnnnnnnnnnnnnnnnnnnnnnnnnnnnnnnnnnnnnnnnnnnnnnnnnnnnnnnnnnnnnnnnnnnnnnnnnnnnnnnnnnnnnnnnnnnnnnnnnnnnnnnnnnnnnnnnnnnnnnnnnnnnnnnnnnnnnnnnnnnnnnnnnnnnnnnnnnnnnnnnnnnnnnnnnnnnnnnnnnnnnnnnnnnnnnnnnnnnnnnnnnnnnnnnnnnnnnnnnnnnnnnnnnnnnnnnnnnnnnnnnnnnnnnnnnnnnnnnnnnnnnnnnnnnnnnnnnnnnnnnnnnnnnnnnnnnnnnnnnnnnnnnnnnnnnnnnnnnnnnnnnnnnnnnnnnnnnnnnnnnnnnnnnnnnnnnnnnnnnnnnnnnnnnnnnnnnnnnnnnnnnnnnnnnnnnnnnnnnnnnnnnnnnnnnnnnnnnnnnnnnnnnnnnnnnnnnnnnnnnnnnnnnnnnnnnnnnnnnnnnnnnnnnnnnnnnnnnnnnnnnnnnnnnnnnnnnnnnnnnnnnnnnnnnnnnnnnnnnnnnnnnnnnnnnnnnnnnnnnnnnnnnnnnnnnnnnnnnnnnnnnnnnnnnnnnnnnnnnnnnnnnnnnnnnnnnnnnnnnnnnnnnnnnnnnnnnnnnnnnnnnnnnnnnnnnnnnnnnnnnnnnnnnnnnnnnnnnnnnnnnnnnnnnnnnnnnnnnnnnnnnnnnnnnnnnnnnnnnnnnnnnnnnnnnnnnnnnnnnnnnnnnnnnnnnnnnnnnnnnnnnnnnnnnnnnnnnnnnnnnnnnnnnnnnnnnnnnnnnnnnnnnnnnnnnnnnnnnnnnnnnnnnnnnnnnnnnnnnnnnnnnnnnnnnnnnnnnnnnnnnnnnnnnnnnnnnnnnnnnnnnnnnnnnnnnnnnnnnnnnnnnnnnnnnnnnnnnnnnnnnnnnnnnnnnnnnnnnnnnnnnnnnnnnnnnnnnnnnnnnnnnnnnnnnnnnnnnnnnnnnnnnnnnnnnnnnnnnnnnnnnnnnnnnnnnnnnnnnnnnnnnnnnnnnnnnnnnnnnnnnnnnnnnnnnnnnnnnnnnnnnnnnnnnnnnnnnnnnnnnnnnnnnnnnnnnnnnnnnnnnnnnnnnnnnnnnnnnnnnnnnnnnnnnnnnnnnnnnnnnnnnnnnnnnnnnnnnnnnnnnnnnnnnnnnnnnnnnnnnnnnnnnnnnnnnnnnnnnnnnnnnnnnnnnnnnnnnnnnnnnnnnnnnnnnnnnnnnnnnnnnnnnnnnnnnnnnnnnnnnnnnnnnnnnnnnnnnnnnnnnnnnnnnnnnnnnnnnnnnnnnnnnnnnnnnnnnnnnnnnnnnnnnnnnnnnnnnnnnnnnnnnnnnnnnnnnnnnnnnnnnnnnnnnnnnnnnnnnnnnnnnnnnnnnnnnnnnnnnnnnnnnnnnnnnnnnnnnnnnnnnnnnnnnnnnnnnnnnnnnnnnnnnnnnnnnnnnnnnnnnnnnnnnnnnnnnnnnnnnnnnnnnnnnnnnnnnnnnnnnnnnnnnnnnnnnnnnnnnnnnnnnnnnnnnnnnnnnnnnnnnnnnnnnnnnnnnnnnnnnnnnnnnnnnnnnnnnnnnnnnnnnnnnnnnnnnnnnnnnnnnnnnnnnnnnnnnnnnnnnnnnnnnnnnnnnnnnnnnnnnnnnnnnnnnnnnnnnnnnnnnnnnnnnnnnnnnnnnnnnnnnnnnnnnnnnnnnnnnnnnnnnnnnnnnnnnnnnnnnnnnnnnnnnnnnnnnnnnnnnnnnnnnnnnnnnnnnnnnnnnnnnnnnnnnnnnnnnnnnnnnnnnnnnnnnnnnnnnnnnnnnnnnnnnnnnnnnnnnnnnnnnnnnnnnnnnnnnnnnnnnnnnnnnnnnnnnnnnnnnnnnnnnnnnnnnnnnnnnnnnnnnnnnnnnnnnnnnnnnnnnnnnnnnnnnnnnnnnnnnnnnnnnnnnnnnnnnnnnnnnnnnnnnnnnnnnnnnnnnnnnnnnnnnnnnnnnnnnnnnnnnnnnnnnnnnnnnnnnnnnnnnnnnnnnnnnnnnnnnnnnnnnnnnnnnnnnnnnnnnnnnnnnnnnnnnnnnnnnnnnnnnnnnnnnnnnnnnnnnnnnnnnnnnnnnnnnnnnnnnnnnnnnnnnnnnnnnnnnnnnnnnnnnnnnnnnnnnnnnnnnnnnnnnnnnnnnnnnnnnnnnnnnnnnnnnnnnnnnnnnnnnnnnnnnnnnnnnnnnnnnnnnnnnnnnnnnnnnnnnnnnnnnnnnnnnnnnnnnnnnnnnnnnnnnnnnnnnnnnnnnnnnnnnnnnnnnnnnnnnnnnnnnnnnnnnnnnnnnnnnnnnnnnnnnnnnnnnnnnnnnnnnnnnnnnnnnnnnnnnnnnnnnnnnnnnnnnnnnnnnnnnnnnnnnnnnnnnnnnnnnnnnnnnnnnnnnnnnnnnnnnnnnnnnnnnnnnnnnnnnnnnnnnnnnnnnnnnnnnnnnnnnnnnnnnnnnnnnnnnnnnnnnnnnnnnnnnnnnnnnnnnnnnnnnnnnnnnnnnnnnnnnnnnnnnnnnnnnnnnnnnnnnnnnnnnnnnnnnnnnnnnnnnnnnnnnnnnnnnnnnnnnnnnnnnnnnnnnnnnnnnnnnnnnnnnnnnnnnnnnnnnnnnnnnnnnnnnnnnnnnnnnnnnnnnnnnnnnnnnnnnnnnnnnnnnnnnnnnnnnnnnnnnnnnnnnnnnnnnnnnnnnnnnnnnnnnnnnnnnnnnnnnnnnnnnnnnnnnnnnnnnnnnnnnnnnnnnnnnnnnnnnnnnnnnnnnnnnnnnnnnnnnnnnnnnnnnnnnnnnnnnnnnnnnnnnnnnnnnnnnnnnnnnnnnnnnnnnnnnnnnnnnnnnnnnnnnnnnnnnnnnnnnnnnnnnnnnnnnnnnnnnnnnnnnnnnnnnnnnnnnnnnnnnnnnnnnnnnnnnnnnnnnnnnnnnnnnnnnnnnnnnnnnnnnnnnnnnnnnnnnnnnnnnnnnnnnnnnnnnnnnnnnnnnnnnnnnnnnnnnnnnnnnnnnnnnnnnnnnnnnnnnnnnnnnnnnnnnnnnnnnnnnnnnnnnnnnnnnnnnnnnnnnnnnnnnnnnnnnnnnnnnnnnnnnnnnnnnnnnnnnnnnnnnnnnnnnnnnnnnnnnnnnnnnnnnnnnnnnnnnnnnnnnnnnnnnnnnnnnnnnnnnnnnnnnnnnnnnnnnnnnnnnnnnnnnnnnnnnnnnnnnnnnnnnnnnnnnnnnnnnnnnnnnnnnnnnnnnnnnnnnnnnnnnnnnnnnnnnnnnnnnnnnnnnnnnnnnnnnnnnnnnnnnnnnnnnnnnnnnnnnnnnnnnnnnnnnnnnnnnnnnnnnnnnnnnnnnnnnnnnnnnnnnnnnnnnnnnnnnnnnnnnnnnnnnnnnnnnnnnnnnnnnnnnnnnnnnnnnnnnnnnnnnnnnnnnnnnnnnnnnnnnnnnnnnnnnnnnnnnnnnnnnnnnnnnnnnnnnnnnnnnnnnnnnnnnnnnnnnnnnnnnnnnnnnnnnnnnnnnnnnnnnnnnnnnnnnnnnnnnnnnnnnnnnnnnnnnnnnnnnnnnnnnnnnnnnnnnnnnnnnnnnnnnnnnnnnnnnnnnnnnnnnnnnnnnnnnnnnnnnnnnnnnnnnnnnnnnnnnnnnnnnnnnnnnnnnnnnnnnnnnnnnnnnnnnnnnnnnnnnnnnnnnnnnnnnnnnnnnnnnnnnnnnnnnnnnnnnnnnnnnnnnnnnnnnnnnnnnnnnnnnnnnnnnnnnnnnnnnnnnnnnnnnnnnnnnnnnnnnnnnnnnnnnnnnnnnnnnnnnnnnnnnnnnnnnnnnnnnnnnnnnnnnnnnnnnnnnnnnnnnnnnnnnnnnnnnnnnnnnnnnnnnnnnnnnnnnnnnnnnnnnnnnnnnnnnnnnnnnnnnnnnnnnnnnnnnnnnnnnnnnnnnnnnnnnnnnnnnnnnnnnnnnnnnnnnnnnnnnnnnnnnnnnnnnnnnnnnnnnnnnnnnnnnnnnnnnnnnnnnnnnnnnnnnnnnnnnnnnnnnnnnnnnnnnnnnnnnnnnnnnnnnnnnnnnnnnnnnnnnnnnnnnnnnnnnnnnnnnnnnnnnnnnnnnnnnnnnnnnnnnnnnnnnnnnnnnnnnnnnnnnnnnnnnnnnnnnnnnnnnnnnnnnnnnnnnnnnnnnnnnnnnnnnnnnnnnnnnnnnnnnnnnnnnnnnnnnnnnnnnnnnnnnnnnnnnnnnnnnnnnnnnnnnnnnnnnnnnnnnnnnnnnnnnnnnnnnnnnnnnnnnnnnnnnnnnnnnnnnnnnnnnnnnnnnnnnnnnnnnnnnnnnnnnnnnnnnnnnnnnnnnnnnnnnnnnnnnnnnnnnnnnnnnnnnnnnnnnnnnnnnnnnnnnnnnnnnnnnnnnnnnnnnnnnnnnnnnnnnnnnnnnnnnnnnnnnnnnnnnnnnnnnnnnnnnnnnnnnnnnnnnnnnnnnnnnnnnnnnnnnnnnnnnnnnnnnnnnnnnnnnnnnnnnnnnnnnnnnnnnnnnnnnnnnnnnnnnnnnnnnnnnnnnnnnnnnnnnnnnnnnnnnnnnnnnnnnnnnnnnnnnnnnnnnnnnnnnnnnnnnnnnnnnnnnnnnnnnnnnnnnnnnnnnnnnnnnnnnnnnnnnnnnnnnnnnnnnnnnnnnnnnnnnnnnnnnnnnnnnnnnnnnnnnnnnnnnnnnnnnnnnnnnnnnnnnnnnnnnnnnnnnnnnnnnnnnnnnnnnnnnnnnnnnnnnnnnnnnnnnnnnnnnnnnnnnnnnnnnnnnnnnnnnnnnnnnnnnnnnnnnnnnnnnnnnnnnnnnnnnnnnnnnnnnnnnnnnnnnnnnnnnnnnnnnnnnnnnnnnnnnnnnnnnnnnnnnnnnnnnnnnnnnnnnnnnnnnnnnnnnnnnnnnnnnnnnnnnnnnnnnnnnnnnnnnnnnnnnnnnnnnnnnnnnnnnnnnnnnnnnnnnnnnnnnnnnnnnnnnnnnnnnnnnnnnnnnnnnnnnnnnnnnnnnnnnnnnnnnnnnnnnnnnnnnnnnnnnnnnnnnnnnnnnnnnnnnnnnnnnnnnnnnnnnnnnnnnnnnnnnnnnnnnnnnnnnnnnnnnnnnnnnnnnnnnnnnnnnnnnnnnnnnnnnnnnnnnnnnnnnnnnnnnnnnnnnnnnnnnnnnnnnnnnnnnnnnnnnnnnnnnnnnnnnnnnnnnnnnnnnnnnnnnnnnnnnnnnnnnnnnnnnnnnnnnnnnnnnnnnnnnnnnnnnnnnnnnnnnnnnnnnnnnnnnnnnnnnnnnnnnnnnnnnnnnnnnnnnnnnnnnnnnnnnnnnnnnnnnnnnnnnnnnnnnnnnnnnnnnnnnnnnnnnnnnnnnnnnnnnnnnnnnnnnnnnnnnnnnnnnnnnnnnnnnnnnnnnnnnnnnnnnnnnnnnnnnnnnnnnnnnnnnnnnnnnnnnnnnnnnnnnnnnnnnnnnnnnnnnnnnnnnnnnnnnnnnnnnnnnnnnnnnnnnnnnnnnnnnnnnnnnnnnnnnnnnnnnnnnnnnnnnnnnnnnnnnnnnnnnnnnnnnnnnnnnnnnnnnnnnnnnnnnnnnnnnnnnnnnnnnnnnnnnnnnnnnnnnnnnnnnnnnnnnnnnnnnnnnnnnnnnnnnnnnnnnnnnnnnnnnnnnnnnnnnnnnnnnnnnnnnnnnnnnnnnnnnnnnnnnnnnnnnnnnnnnnnnnnnnnnnnnnnnnnnnnnnnnnnnnnnnnnnnnnnnnnnnnnnnnnnnnnnnnnnnnnnnnnnnnnnnnnnnnnnnnnnnnnnnnnnnnnnnnnnnnnnnnnnnnnnnnnnnnnnnnnnnnnnnnnnnnnnnnnnnnnnnnnnnnnnnnnnnnnnnnnnnnnnnnnnnnnnnnnnnnnnnnnnnnnnnnnnnnnnnnnnnnnnnnnnnnnnnnnnnnnnnnnnnnnnnnnnnnnnnnnnnnnnnnnnnnnnnnnnnnnnnnnnnnnnnnnnnnnnnnnnnnnnnnnnnnnnnnnnnnnnnnnnnnnnnnnnnnnnnnnnnnnnnnnnnnnnnnnnnnnnnnnnnnnnnnnnnnnnnnnnnnnnnnnnnnnnnnnnnnnnnnnnnnnnnnnnnnnnnnnnnnnnnnnnnnnnnnnnnnnnnnnnnnnnnnnnnnnnnnnnnnnnnnnnnnnnnnnnnnnnnnnnnnnnnnnnnnnnnnnnnnnnnnnnnnnnnnnnnnnnnnnnnnnnnnnnnnnnnnnnnnnnnnnnnnnnnnnnnnnnnnnnnnnnnnnnnnnnnnnnnnnnnnnnnnnnnnnnnnnnnnnnnnnnnnnnnnnnnnnnnnnnnnnnnnnnnnnnnnnnnnnnnnnnnnnnnnnnnnnnnnnnnnnnnnnnnnnnnnnnnnnnnnnnnnnnnnnnnnnnnnnnnnnnnnnnnnnnnnnnnnnnnnnnnnnnnnnnnnnnnnnnnnnnnnnnnnnnnnnnnnnnnnnnnnnnnnnnnnnnnnnnnnnnnnnnnnnnnnnnnnnnnnnnnnnnnnnnnnnnnnnnnnnnnnnnnnnnnnnnnnnnnnnnnnnnnnnnnnnnnnnnnnnnnnnnnnnnnnnnnnnnnnnnnnnnnnnnnnnnnnnnnnnnnnnnnnnnnnnnnnnnnnnnnnnnnnnnnnnnnnnnnnnnnnnnnnnnnnnnnnnnnnnnnnnnnnnnnnnnnnnnnnnnnnnnnnnnnnnnnnnnnnnnnnnnnnnnnnnnnnnnnnnnnnnnnnnnnnnnnnnnnnnnnnnnnnnnnnnnnnnnnnnnnnnnnnnnnnnnnnnnnnnnnnnnnnnnnnnnnnnnnnnnnnnnnnnnnnnnnnnnnnnnnnnnnnnnnnnnnnnnnnnnnnnnnnnnnnnnnnnnnnnnnnnnnnnnnnnnnnnnnnnnnnnnnnnnnnnnnnnnnnnnnnnnnnnnnnnnnnnnnnnnnnnnnnnnnnnnnnnnnnnnnnnnnnnnnnnnnnnnnnnnnnnnnnnnnnnnnnnnnnnnnnnnnnnnnnnnnnnnnnnnnnnnnnnnnnnnnnnnnnnnnnnnnnnnnnnnnnnnnnnnnnnnnnnnnnnnnnnnnnnnnnnnnnnnnnnnnnnnnnnnnnnnnnnnnnnnnnnnnnnnnnnnnnnnnnnnnnnnnnnnnnnnnnnnnnnnnnnnnnnnnnnnnnnnnnnnnnnnnnnnnnnnnnnnnnnnnnnnnnnnnnnnnnnnnnnnnnnnnnnnnnnnnnnnnnnnnnnnnnnnnnnnnnnnnnnnnnnnnnnnnnnnnnnnnnnnnnnnnnnnnnnnnnnnnnnnnnnnnnnnnnnnnnnnnnnnnnnnnnnnnnnnnnnnnnnnnnnnnnnnnnnnnnnnnnnnnnnnnnnnnnnnnnnnnnnnnnnnnnnnnnnnnnnnnnnnnnnnnnnnnnnnnnnnnnnnnnnnnnnnnnnnnnnnnnnnnnnnnnnnnnnnnnnnnnnnnnnnnnnnnnnnnnnnnnnnnnnnnnnnnnnnnnnnnnnnnnnnnnnnnnnnnnnnnnnnnnnnnnnnnnnnnnnnnnnnnnnnnnnnnnnnnnnnnnnnnnnnnnnnnnnnnnnnnnnnnnnnnnnnnnnnnnnnnnnnnnnnnnnnnnnnnnnnnnnnnnnnnnnnnnnnnnnnnnnnnnnnnnnnnnnnnnnnnnnnnnnnnnnnnnnnnnnnnnnnnnnnnnnnnnnnnnnnnnnnnnnnnnnnnnnnnnnnnnnnnnnnnnnnnnnnnnnnnnnnnnnnnnnnnnnnnnnnnnnnnnnnnnnnnnnnnnnnnnnnnnnnnnnnnnnnnnnnnnnnnnnnnnnnnnnnnnnnnnnnnnnnnnnnnnnnnnnnnnnnnnnnnnnnnnnnnnnnnnnnnnnnnnnnnnnnnnnnnnnnnnnnnnnnnnnnnnnnnnnnnnnnnnnnnnnnnnnnnnnnnnnnnnnnnnnnnnnnnnnnnnnnnnnnnnnnnnnnnnnnnnnnnnnnnnnnnnnnnnnnnnnnnnnnnnnnnnnnnnnnnnnnnnnnnnnnnnnnnnnnnnnnnnnnnnnnnnnnnnnnnnnnnnnnnnnnnnnnnnnnnnnnnnnnnnnnnnnnnnnnnnnnnnnnnnnnnnnnnnnnnnnnnnnnnnnnnnnnnnnnnnnnnnnnnnnnnnnnnnnnnnnnnnnnnnnnnnnnnnnnnnnnnnnnnnnnnnnnnnnnnnnnnnnnnnnnnnnnnnnnnnnnnnnnnnnnnnnnnnnnnnnnnnnnnnnnnnnnnnnnnnnnnnnnnnnnnnnnnnnnnnnnnnnnnnnnnnnnnnnnnnnnnnnnnnnnnnnnnnnnnnnnnnnnnnnnnnnnnnnnnnnnnnnnnnnnnnnnnnnnnnnnnnnnnnnnnnnnnnnnnnnnnnnnnnnnnnnnnnnnnnnnnnnnnnnnnnnnnnnnnnnnnnnnnnnnnnnnnnnnnnnnnnnnnnnnnnnnnnnnnnnnnnnnnnnnnnnnnnnnnnnnnnnnnnnnnnnnnnnnnnnnnnnnnnnnnnnnnnnnnnnnnnnnnnnnnnnnnnnnnnnnnnnnnnnnnnnnnnnnnnnnnnnnnnnnnnnnnnnnnnnnnnnnnnnnnnnnnnnnnnnnnnnnnnnnnnnnnnnnnnnnnnnnnnnnnnnnnnnnnnnnnnnnnnnnnnnnnnnnnnnnnnnnnnnnnnnnnnnnnnnnnnnnnnnnnnnnnnnnnnnnnnnnnnnnnnnnnnnnnnnnnnnnnnnnnnnnnnnnnnnnnnnnnnnnnnnnnnnnnnnnnnnnnnnnnnnnnnnnnnnnnnnnnnnnnnnnnnnnnnnnnnnnnnnnnnnnnnnnnnnnnnnnnnnnnnnnnnnnnnnnnnnnnnnnnnnnnnnnnnnnnnnnnnnnnnnnnnnnnnnnnnnnnnnnnnnnnnnnnnnnnnnnnnnnnnnnnnnnnnnnnnnnnnnnnnnnnnnnnnnnnnnnnnnnnnnnnnnnnnnnnnnnnnnnnnnnnnnnnnnnnnnnnnnnnnnnnnnnnnnnnnnnnnnnnnnnnnnnnnnnnnnnnnnnnnnnnnnnnnnnnnnnnnnnnnnnnnnnnnnnnnnnnnnnnnnnnnnnnnnnnnnnnnnnnnnnnnnnnnnnnnnnnnnnnnnnnnnnnnnnnnnnnnnnnnnnnnnnnnnnnnnnnnnnnnnnnnnnnnnnnnnnnnnnnnnnnnnnnnnnnnnnnnnnnnnnnnnnnnnnnnnnnnnnnnnnnnnnnnnnnnnnnnnnnnnnnnnnnnnnnnnnnnnnnnnnnnnnnnnnnnnnnnnnnnnnnnnnnnnnnnnnnnnnnnnnnnnnnnnnnnnnnnnnnnnnnnnnnnnnnnnnnnnnnnnnnnnnnnnnnnnnnnnnnnnnnnnnnnnnnnnnnnnnnnnnnnnnnnnnnnnnnnnnnnnnnnnnnnnnnnnnnnnnnnnnnnnnnnnnnnnnnnnnnnnnnnnnnnnnnnnnnnnnnnnnnnnnnnnnnnnnnnnnnnnnnnnnnnnnnnnnnnnnnnnnnnnnnnnnnnnnnnnnnnnnnnnnnnnnnnnnnnnnnnnnnnnnnnnnnnnnnnnnnnnnnnnnnnnnnnnnnnnnnnnnnnnnnnnnnnnnnnnnnnnnnnnnnnnnnnnnnnnnnnnnnnnnnnnnnnnnnnnnnnnnnnnnnnnnnnnnnnnnnnnnnnnnnnnnnnnnnnnnnnnnnnnnnnnnnnnnnnnnnnnnnnnnnnnnnnnnnnnnnnnnnnnnnnnnnnnnnnnnnnnnnnnnnnnnnnnnnnnnnnnnnnnnnnnnnnnnnnnnnnnnnnnnnnnnnnnnnnnnnnnnnnnnnnnnnnnnnnnnnnnnnnnnnnnnnnnnnnnnnnnnnnnnnnnnnnnnnnnnnnnnnnnnnnnnnnnnnnnnnnnnnnnnnnnnnnnnnnnnnnnnnnnnnnnnnnnnnnnnnnnnnnnnnnnnnnnnnnnnnnnnnnnnnnnnnnnnnnnnnnnnnnnnnnnnnnnnnnnnnnnnnnnnnnnnnnnnnnnnnnnnnnnnnnnnnnnnnnnnnnnnnnnnnnnnnnnnnnnnnnnnnnnnnnnnnnnnnnnnnnnnnnnnnnnnnnnnnnnnnnnnnnnnnnnnnnnnnnnnnnnnnnnnnnnnnnnnnnnnnnnnnnnnnnnnnnnnnnnnnnnnnnnnnnnnnnnnnnnnnnnnnnnnnnnnnnnnnnnnnnnnnnnnnnnnnnnnnnnnnnnnnnnnnnnnnnnnnnnnnnnnnnnnnnnnnnnnnnnnnnnnnnnnnnnnnnnnnnnnnnnnnnnnnnnnnnnnnnnnnnnnnnnnnnnnnnnnnnnnnnnnnnnnnnnnnnnnnnnnnnnnnnnnnnnnnnnnnnnnnnnnnnnnnnnnnnnnnnnnnnnnnnnnnnnnnnnnnnnnnnnnnnnnnnnnnnnnnnnnnnnnnnnnnnnnnnnnnnnnnnnnnnnnnnnnnnnnnnnnnnnnnnnnnnnnnnnnnnnnnnnnnnnnnnnnnnnnnnnnnnnnnnnnnnnnnnnnnnnnnnnnnnnnnnnnnnnnnnnnnnnnnnnnnnnnnnnnnnnnnnnnnnnnnnnnnnnnnnnnnnnnnnnnnnnnnnnnnnnnnnnnnnnnnnnnnnnnnnnnnnnnnnnnnnnnnnnnnnnnnnnnnnnnnnnnnnnnnnnnnnnnnnnnnnnnnnnnnnnnnnnnnnnnnnnnnnnnnnnnnnnnnnnnnnnnnnnnnnnnnnnnnnnnnnnnnnnnnnnnnnnnnnnnnnnnnnnnnnnnnnnnnnnnnnnnnnnnnnnnnnnnnnnnnnnnnnnnnnnnnnnnnnnnnnnnnnnnnnnnnnnnnnnnnnnnnnnnnnnnnnnnnnnnnnnnnnnnnnnnnnnnnnnnnnnnnnnnnnnnnnnnnnnnnnnnnnnnnnnnnnnnnnnnnnnnnnnnnnnnnnnnnnnnnnnnnnnnnnnnnnnnnnnnnnnnnnnnnnnnnnnnnnnnnnnnnnnnnnnnnnnnnnnnnnnnnnnnnnnnnnnnnnnnnnnnnnnnnnnnnnnnnnnnnnnnnnnnnnnnnnnnnnnnnnnnnnnnnnnnnnnnnnnnnnnnnnnnnnnnnnnnnnnnnnnnnnnnnnnnnnnnnnnnnnnnnnnnnnnnnnnnnnnnnnnnnnnnnnnnnnnnnnnnnnnnnnnnnnnnnnnnnnnnnnnnnnnnnnnnnnnnnnnnnnnnnnnnnnnnnnnnnnnnnnnnnnnnnnnnnnnnnnnnnnnnnnnnnnnnnnnnnnnnnnnnnnnnnnnnnnnnnnnnnnnnnnnnnnnnnnnnnnnnnnnnnnnnnnnnnnnnnnnnnnnnnnnnnnnnnnnnnnnnnnnnnnnnnnnnnnnnnnnnnnnnnnnnnnnnnnnnnnnnnnnnnnnnnnnnnnnnnnnnnnnnnnnnnnnnnnnnnnnnnnnnnnnnnnnnnnnnnnnnnnnnnnnnnnnnnnnnnnnnnnnnnnnnnnnnnnnnnnnnnnnnnnnnnnnnnnnnnnnnnnnnnnnnnnnnnnnnnnnnnnnnnnnnnnnnnnnnnnnnnnnnnnnnnnnnnnnnnnnnnnnnnnnnnnnnnnnnnnnnnnnnnnnnnnnnnnnnnnnnnnnnnnnnnnnnnnnnnnnnnnnnnnnnnnnnnnnnnnnnnnnnnnnnnnnnnnnnnnnnnnnnnnnnnnnnnnnnnnnnnnnnnnnnnnnnnnnnnnnnnnnnnnnnnnnnnnnnnnnnnnnnnnnnnnnnnnnnnnnnnnnnnnnnnnnnnnnnnnnnnnnnnnnnnnnnnnnnnnnnnnnnnnnnnnnnnnnnnnnnnnnnnnnnnnnnnnnnnnnnnnnnnnnnnnnnnnnnnnnnnnnnnnnnnnnnnnnnnnnnnnnnnnnnnnnnnnnnnnnnnnnnnnnnnnnnnnnnnnnnnnnnnnnnnnnnnnnnnnnnnnnnnnnnnnnnnnnnnnnnnnnnnnnnnnnnnnnnnnnnnnnnnnnnnnnnnnnnnnnnnnnnnnnnnnnnnnnnnnnnnnnnnnnnnnnnnnnnnnnnnnnnnnnnnnnnnnnnnnnnnnnnnnnnnnnnnnnnnnnnnnnnnnnnnnnnnnnnnnnnnnnnnnnnnnnnnnnnnnnnnnnnnnnnnnnnnnnnnnnnnnnnnnnnnnnnnnnnnnnnnnnnnnnnnnnnnnnnnnnnnnnnnnnnnnnnnnnnnnnnnnnnnnnnnnnnnnnnnnnnnnnnnnnnnnnnnnnnnnnnnnnnnnnnnnnnnnnnnnnnnnnnnnnnnnnnnnnnnnnnnnnnnnnnnnnnnnnnnnnnnnnnnnnnnnnnnnnnnnnnnnnnnnnnnnnnnnnnnnnnnnnnnnnnnnnnnnnnnnnnnnnnnnnnnnnnnnnnnnnnnnnnnnnnnnnnnnnnnnnnnnnnnnnnnnnnnnnnnnnnnnnnnnnnnnnnnnnnnnnnnnnnnnnnnnnnnnnnnnnnnnnnnnnnnnnnnnnnnnnnnnnnnnnnnnnnnnnnnnnnnnnnnnnnnnnnnnnnnnnnnnnnnnnnnnnnnnnnnnnnnnnnnnnnnnnnnnnnnnnnnnnnnnnnnnnnnnnnnnnnnnnnnnnnnnnnnnnnnnnnnnnnnnnnnnnnnnnnnnnnnnnnnnnnnnnnnnnnnnnnnnnnnnnnnnnnnnnnnnnnnnnnnnnnnnnnnnnnnnnnnnnnnnnnnnnnnnnnnnnnnnnnnnnnnnnnnnnnnnnnnnnnnnnnnnnnnnnnnnnnnnnnnnnnnnnnnnnnnnnnnnnnnnnnnnnnnnnnnnnnnnnnnnnnnnnnnnnnnnnnnnnnnnnnnnnnnnnnnnnnnnnnnnnnnnnnnnnnnnnnnnnnnnnnnnnnnnnnnnnnnnnnnnnnnnnnnnnnnnnnnnnnnnnnnnnnnnnnnnnnnnnnnnnnnnnnnnnnnnnnnnnnnnnnnnnnnnnnnnnnnnnnnnnnnnnnnnnnnnnnnnnnnnnnnnnnnnnnnnnnnnnnnnnnnnnnnnnnnnnnnnnnnnnnnnnnnnnnnnnnnnnnnnnnnnnnnnnnnnnnnnnnnnnnnnnnnnnnnnnnnnnnnnnnnnnnnnnnnnnnnnnnnnnnnnnnnnnnnnnnnnnnnnnnnnnnnnnnnnnnnnnnnnnnnnnnnnnnnnnnnnnnnnnnnnnnnnnnnnnnnnnnnnnnnnnnnnnnnnnnnnnnnnnnnnnnnnnnnnnnnnnnnnnnnnnnnnnnnnnnnnnnnnnnnnnnnnnnnnnnnnnnnnnnnnnnnnnnnnnnnnnnnnnnnnnnnnnnnnnnnnnnnnnnnnnnnnnnnnnnnnnnnnnnnnnnnnnnnnnnnnnnnnnnnnnnnnnnnnnnnnnnnnnnnnnnnnnnnnnnnnnnnnnnnnnnnnnnnnnnnnnnnnnnnnnnnnnnnnnnnnnnnnnnnnnnnnnnnnnnnnnnnnnnnnnnnnnnnnnnnnnnnnnnnnnnnnnnnnnnnnnnnnnnnnnnnnnnnnnnnnnnnnnnnnnnnnnnnnnnnnnnnnnnnnnnnnnnnnnnnnnnnnnnnnnnnnnnnnnnnnnnnnnnnnnnnnnnnnnnnnnnnnnnnnnnnnnnnnnnnnnnnnnnnnnnnnnnnnnnnnnnnnnnnnnnnnnnnnnnnnnnnnnnnnnnnnnnnnnnnnnnnnnnnnnnnnnnnnnnnnnnnnnnnnnnnnnnnnnnnnnnnnnnnnnnnnnnnnnnnnnnnnnnnnnnnnnnnnnnnnnnnnnnnnnnnnnnnnnnnnnnnnnnnnnnnnnnnnnnnnnnnnnnnnnnnnnnnnnnnnnnnnnnnnnnnnnnnnnnnnnnnnnnnnnnnnnnnnnnnnnnnnnnnnnnnnnnnnnnnnnnnnnnnnnnnnnnnnnnnnnnnnnnnnnnnnnnnnnnnnnnnnnnnnnnnnnnnnnnnnnnnnnnnnnnnnnnnnnnnnnnnnnnnnnnnnnnnnnnnnnnnnnnnnnnnnnnnnnnnnnnnnnnnnnnnnnnnnnnnnnnnnnnnnnnnnnnnnnnnnnnnnnnnnnnnnnnnnnnnnnnnnnnnnnnnnnnnnnnnnnnnnnnnnnnnnnnnnnnnnnnnnnnnnnnnnnnnnnnnnnnnnnnnnnnnnnnnnnnnnnnnnnnnnnnnnnnnnnnnnnnnnnnnnnnnnnnnnnnnnnnnnnnnnnnnnnnnnnnnnnnnnnnnnnnnnnnnnnnnnnnnnnnnnnnnnnnnnnnnnnnnnnnnnnnnnnnnnnnnnnnnnnnnnnnnnnnnnnnnnnnnnnnnnnnnnnnnnnnnnnnnnnnnnnnnnnnnnnnnnnnnnnnnnnnnnnnnnnnnnnnnnnnnnnnnnnnnnnnnnnnnnnnnnnnnnnnnnnnnnnnnnnnnnnnnnnnnnnnnnnnnnnnnnnnnnnnnnnnnnnnnnnnnnnnnnnnnnnnnnnnnnnnnnnnnnnnnnnnnnnnnnnnnnnnnnnnnnnnnnnnnnnnnnnnnnnnnnnnnnnnnnnnnnnnnnnnnnnnnnnnnnnnnnnnnnnnnnnnnnnnnnnnnnnnnnnnnnnnnnnnnnnnnnnnnnnnnnnnnnnnnnnnnnnnnnnnnnnnnnnnnnnnnnnnnnnnnnnnnnnnnnnnnnnnnnnnnnnnnnnnnnnnnnnnnnnnnnnnnnnnnnnnnnnnnnnnnnnnnnnnnnnnnnnnnnnnnnnnnnnnnnnnnnnnnnnnnnnnnnnnnnnnnnnnnnnnnnnnnnnnnnnnnnnnnnnnnnnnnnnnnnnnnnnnnnnnnnnnnnnnnnnnnnnnnnnnnnnnnnnnnnnnnnnnnnnnnnnnnnnnnnnnnnnnnnnnnnnnnnnnnnnnnnnnnnnnnnnnnnnnnnnnnnnnnnnnnnnnnnnnnnnnnnnnnnnnnnnnnnnnnnnnnnnnnnnnnnnnnnnnnnnnnnnnnnnnnnnnnnnnnnnnnnnnnnnnnnnnnnnnnnnnnnnnnnnnnnnnnnnnnnnnnnnnnnnnnnnnnnnnnnnnnnnnnnnnnnnnnnnnnnnnnnnnnnnnnnnnnnnnnnnnnnnnnnnnnnnnnnnnnnnnnnnnnnnnnnnnnnnnnnnnnnnnnnnnnnnnnnnnnnnnnnnnnnnnnnnnnnnnnnnnnnnnnnnnnnnnnnnnnnnnnnnnnnnnnnnnnnnnnnnnnnnnnnnnnnnnnnnnnnnnnnnnnnnnnnnnnnnnnnnnnnnnnnnnnnnnnnnnnnnnnnnnnnnnnnnnnnnnnnnnnnnnnnnnnnnnnnnnnnnnnnnnnnnnnnnnnnnnnnnnnnnnnnnnnnnnnnnnnnnnnnnnnnnnnnnnnnnnnnnnnnnnnnnnnnnnnnnnnnnnnnnnnnnnnnnnnnnnnnnnnnnnnnnnnnnnnnnnnnnnnnnnnnnnnnnnnnnnnnnnnnnnnnnnnnnnnnnnnnnnnnnnnnnnnnnnnnnnnnnnnnnnnnnnnnnnnnnnnnnnnnnnnnnnnnnnnnnnnnnnnnnnnnnnnnnnnnnnnnnnnnnnnnnnnnnnnnnnnnnnnnnnnnnnnnnnnnnnnnnnnnnnnnnnnnnnnnnnnnnnnnnnnnnnnnnnnnnnnnnnnnnnnnnnnnnnnnnnnnnnnnnnnnnnnnnnnnnnnnnnnnnnnnnnnnnnnnnnnnnnnnnnnnnnnnnnnnnnnnnnnnnnnnnnnnnnnnnnnnnnnnnnnnnnnnnnnnnnnnnnnnnnnnnnnnnnnnnnnnnnnnnnnnnnnnnnnnnnnnnnnnnnnnnnnnnnnnnnnnnnnnnnnnnnnnnnnnnnnnnnnnnnnnnnnnngctcttcnnnnngaagagcttc

SEQ ID NO: 24 - DNA, 39 bp, Artificial Sequence
  source: /note="Description of Artificial Sequence: Synthetic oligonucleotide"
  modified_base (11)..(12): a, c, t, or g
  modified_base (25)..(29): a, c, t, or g
gaagctcttcnngaagagctcttcnnnnngaagagcttc

SEQ ID NO: 25 - DNA, 300038 bp, Artificial Sequence
  source: /note="Description of Artificial Sequence: Synthetic polynucleotide"
  modified_base (4)..(5): a, c, t, or g
  modified_base (12)..(13): a, c, t, or g
  modified_base (20)..(300019): a, c, t, or g
  misc_feature (20)..(300019): /note="This region may encompass 0-300000 nucleotides"
  modified_base (300026)..(300027): a, c, t, or g
  modified_base (300034)..(300035): a, c, t, or g
  source: /note="See specification as filed for detailed description of substitutions and preferred embodiments"
gacnnggtctcnngagaccnnnnnnnnnnnnnnnnnnnnnnnnnnnnnnnnnnnnnnnnnnnnnnnnnnnnnnnnnnnnnnnnnnnnnnnnnnnnnnnnnnnnnnnnnnnnnnnnnnnnnnnnnnnnnnnnnnnnnnnnnnnnnnnnnnnnnnnnnnnnnnnnnnnnnnnnnnnnnnnnnnnnnnnnnnnnnnnnnnnnnnnnnnnnnnnnnnnnnnnnnnnnnnnnnnnnnnnnnnnnnnnnnnnnnnnnnnnnnnnnnnnnnnnnnnnnnnnnnnnnnnnnnnnnnnnnnnnnnnnnnnnnnnnnnnnnnnnnnnnnnnnnnnnnnnnnnnnnnnnnnnnnnnnnnnnnnnnnnnnnnnnnnnnnnnnnnnnnnnnnnnnnnnnnnnnnnnnnnnnnnnnnnnnnnnnnnnnnnnnnnnnnnnnnnnnnnnnnnnnnnnnnnnnnnnnnnnnnnnnnnnnnnnnnnnnnnnnnnnnnnnnnnnnnnnnnnnnnnnnnnnnnnnnnnnnnnnnnnnnnnnnnnnnnnnnnnnnnnnnnnnnnnnnnnnnnnnnnnnnnnnnnnnnnnnnnnnnnnnnnnnnnnnnnnnnnnnnnnnnnnnnnnnnnnnnnnnnnnnnnnnnnnnnnnnnnnnnnnnnnnnnnnnnnnnnnnnnnnnnnnnnnnnnnnnnnnnnnnnnnnnnnnnnnnnnnnnnnnnnnnnnnnnnnnnnnnnnnnnnnnnnnnnnnnnnnnnnnnnnnnnnnnnnnnnnnnnnnnnnnnnnnnnnnnnnnnnnnnnnnnnnnnnnnnnnnnnnnnnnnnnnnnnnnnnnnnnnnnnnnnnnnnnnnnnnnnnnnnnnnnnnnnnnnnnnnnnnnnnnnnnnnnnnnnnnnnnnnnnnnnnnnnnnnnnnnnnnnnnnnnnnnnnnnnnnnnnnnnnnnnnnnnnnnnnnnnnnnnnnnnnnnnnnnnnnnnnnnnnnnnnnnnnnnnnnnnnnnnnnnnnnnnnnnnnnnnnnnnnnnnnnnnnnnnnnnnnnnnnnnnnnnnnnnnnnnnnnnnnnnnnnnnnnnnnnnnnnnnnnnnnnnnnnnnnnnnnnnnnnnnnnnnnnnnnnnnnnnnnnnnnnnnnnnnnnnnnnnnnnnnnnnnnnnnnnnnnnnnnnnnnnnnnnnnnnnnnnnnnnnnnnnnnnnnnnnnnnnnnnnnnnnnnnnnnnnnnnnnnnnnnnnnnnnnnnnnnnnnnnnnnnnnnnnnnnnnnnnnnnnnnnnnnnnnnnnnnnnnnnnnnnnnnnnnnnnnnnnnnnnnnnnnnnnnnnnnnnnnnnnnnnnnnnnnnnnnnnnnnnnnnnnnnnnnnnnnnnnnnnnnnnnnnnnnnnnnnnnnnnnnnnnnnnnnnnnnnnnnnnnnnnnnnnnnnnnnnnnnnnnnnnnnnnnnnnnnnnnnnnnnnnnnnnnnnnnnnnnnnnnnnnnnnnnnnnnnnnnnnnnnnnnnnnnnnnnnnnnnnnnnnnnnnnnnnnnnnnnnnnnnnnnnnnnnnnnnnnnnnnnnnnnnnnnnnnnnnnnnnnnnnnnnnnnnnnnnnnnnnnnnnnnnnnnnnnnnnnnnnnnnnnnnnnnnnnnnnnnnnnnnnnnnnnnnnnnnnnnnnnnnnnnnnnnnnnnnnnnnnnnnnnnnnnnnnnnnnnnnnnnnnnnnnnnnnnnnnnnnnnnnnnnnnnnnnnnnnnnnnnnnnnnnnnnnnnnnnnnnnnnnnnnnnnnnnnnnnnnnnnnnnnnnnnnnnnnnnnnnnnnnnnnnnnnnnnnnnnnnnnnnnnnnnnnnnnnnnnnnnnnnnnnnnnnnnnnnnnnnnnnnnnnnnnnnnnnnnnnnnnnnnnnnnnnnnnnnnnnnnnnnnnnnnnnnnnnnnnnnnnnnnnnnnnnnnnnnnnnnnnnnnnnnnnnnnnnnnnnnnnnnnnnnnnnnnnnnnnnnnnnnnnnnnnnnnnnnnnnnnnnnnnnnnnnnnnnnnnnnnnnnnnnnnnnnnnnnnnnnnnnnnnnnnnnnnnnnnnnnnnnnnnnnnnnnnnnnnnnnnnnnnnnnnnnnnnnnnnnnnnnnnnnnnnnnnnnnnnnnnnnnnnnnnnnnnnnnnnnnnnnnnnnnnnnnnnnnnnnnnnnnnnnnnnnnnnnnnnnnnnnnnnnnnnnnnnnnnnnnnnnnnnnnnnnnnnnnnnnnnnnnnnnnnnnnnnnnnnnnnnnnnnnnnnnnnnnnnnnnnnnnnnnnnnnnnnnnnnnnnnnnnnnnnnnnnnnnnnnnnnnnnnnnnnnnnnnnnnnnnnnnnnnnnnnnnnnnnnnnnnnnnnnnnnnnnnnnnnnnnnnnnnnnnnnnnnnnnnnnnnnnnnnnnnnnnnnnnnnnnnnnnnnnnnnnnnnnnnnnnnnnnnnnnnnnnnnnnnnnnnnnnnnnnnnnnnnnnnnnnnnnnnnnnnnnnnnnnnnnnnnnnnnnnnnnnnnnnnnnnnnnnnnnnnnnnnnnnnnnnnnnnnnnnnnnnnnnnnnnnnnnnnnnnnnnnnnnnnnnnnnnnnnnnnnnnnnnnnnnnnnnnnnnnnnnnnnnnnnnnnnnnnnnnnnnnnnnnnnnnnnnnnnnnnnnnnnnnnnnnnnnnnnnnnnnnnnnnnnnnnnnnnnnnnnnnnnnnnnnnnnnnnnnnnnnnnnnnnnnnnnnnnnnnnnnnnnnnnnnnnnnnnnnnnnnnnnnnnnnnnnnnnnnnnnnnnnnnnnnnnnnnnnnnnnnnnnnnnnnnnnnnnnnnnnnnnnnnnnnnnnnnnnnnnnnnnnnnnnnnnnnnnnnnnnnnnnnnnnnnnnnnnnnnnnnnnnnnnnnnnnnnnnnnnnnnnnnnnnnnnnnnnnnnnnnnnnnnnnnnnnnnnnnnnnnnnnnnnnnnnnnnnnnnnnnnnnnnnnnnnnnnnnnnnnnnnnnnnnnnnnnnnnnnnnnnnnnnnnnnnnnnnnnnnnnnnnnnnnnnnnnnnnnnnnnnnnnnnnnnnnnnnnnnnnnnnnnnnnnnnnnnnnnnnnnnnnnnnnnnnnnnnnnnnnnnnnnnnnnnnnnnnnnnnnnnnnnnnnnnnnnnnnnnnnnnnnnnnnnnnnnnnnnnnnnnnnnnnnnnnnnnnnnnnnnnnnnnnnnnnnnnnnnnnnnnnnnnnnnnnnnnnnnnnnnnnnnnnnnnnnnnnnnnnnnnnnnnnnnnnnnnnnnnnnnnnnnnnnnnnnnnnnnnnnnnnnnnnnnnnnnnnnnnnnnnnnnnnnnnnnnnnnnnnnnnnnnnnnnnnnnnnnnnnnnnnnnnnnnnnnnnnnnnnnnnnnnnnnnnnnnnnnnnnnnnnnnnnnnnnnnnnnnnnnnnnnnnnnnnnnnnnnnnnnnnnnnnnnnnnnnnnnnnnnnnnnnnnnnnnnnnnnnnnnnnnnnnnnnnnnnnnnnnnnnnnnnnnnnnnnnnnnnnnnnnnnnnnnnnnnnnnnnnnnnnnnnnnnnnnnnnnnnnnnnnnnnnnnnnnnnnnnnnnnnnnnnnnnnnnnnnnnnnnnnnnnnnnnnnnnnnnnnnnnnnnnnnnnnnnnnnnnnnnnnnnnnnnnnnnnnnnnnnnnnnnnnnnnnnnnnnnnnnnnnnnnnnnnnnnnnnnnnnnnnnnnnnnnnnnnnnnnnnnnnnnnnnnnnnnnnnnnnnnnnnnnnnnnnnnnnnnnnnnnnnnnnnnnnnnnnnnnnnnnnnnnnnnnnnnnnnnnnnnnnnnnnnnnnnnnnnnnnnnnnnnnnnnnnnnnnnnnnnnnnnnnnnnnnnnnnnnnnnnnnnnnnnnnnnnnnnnnnnnnnnnnnnnnnnnnnnnnnnnnnnnnnnnnnnnnnnnnnnnnnnnnnnnnnnnnnnnnnnnnnnnnnnnnnnnnnnnnnnnnnnnnnnnnnnnnnnnnnnnnnnnnnnnnnnnnnnnnnnnnnnnnnnnnnnnnnnnnnnnnnnnnnnnnnnnnnnnnnnnnnnnnnnnnnnnnnnnnnnnnnnnnnnnnnnnnnnnnnnnnnnnnnnnnnnnnnnnnnnnnnnnnnnnnnnnnnnnnnnnnnnnnnnnnnnnnnnnnnnnnnnnnnnnnnnnnnnnnnnnnnnnnnnnnnnnnnnnnnnnnnnnnnnnnnnnnnnnnnnnnnnnnnnnnnnnnnnnnnnnnnnnnnnnnnnnnnnnnnnnnnnnnnnnnnnnnnnnnnnnnnnnnnnnnnnnnnnnnnnnnnnnnnnnnnnnnnnnnnnnnnnnnnnnnnnnnnnnnnnnnnnnnnnnnnnnnnnnnnnnnnnnnnnnnnnnnnnnnnnnnnnnnnnnnnnnnnnnnnnnnnnnnnnnnnnnnnnnnnnnnnnnnnnnnnnnnnnnnnnnnnnnnnnnnnnnnnnnnnnnnnnnnnnnnnnnnnnnnnnnnnnnnnnnnnnnnnnnnnnnnnnnnnnnnnnnnnnnnnnnnnnnnnnnnnnnnnnnnnnnnnnnnnnnnnnnnnnnnnnnnnnnnnnnnnnnnnnnnnnnnnnnnnnnnnnnnnnnnnnnnnnnnnnnnnnnnnnnnnnnnnnnnnnnnnnnnnnnnnnnnnnnnnnnnnnnnnnnnnnnnnnnnnnnnnnnnnnnnnnnnnnnnnnnnnnnnnnnnnnnnnnnnnnnnnnnnnnnnnnnnnnnnnnnnnnnnnnnnnnnnnnnnnnnnnnnnnnnnnnnnnnnnnnnnnnnnnnnnnnnnnnnnnnnnnnnnnnnnnnnnnnnnnnnnnnnnnnnnnnnnnnnnnnnnnnnnnnnnnnnnnnnnnnnnnnnnnnnnnnnnnnnnnnnnnnnnnnnnnnnnnnnnnnnnnnnnnnnnnnnnnnnnnnnnnnnnnnnnnnnnnnnnnnnnnnnnnnnnnnnnnnnnnnnnnnnnnnnnnnnnnnnnnnnnnnnnnnnnnnnnnnnnnnnnnnnnnnnnnnnnnnnnnnnnnnnnnnnnnnnnnnnnnnnnnnnnnnnnnnnnnnnnnnnnnnnnnnnnnnnnnnnnnnnnnnnnnnnnnnnnnnnnnnnnnnnnnnnnnnnnnnnnnnnnnnnnnnnnnnnnnnnnnnnnnnnnnnnnnnnnnnnnnnnnnnnnnnnnnnnnnnnnnnnnnnnnnnnnnnnnnnnnnnnnnnnnnnnnnnnnnnnnnnnnnnnnnnnnnnnnnnnnnnnnnnnnnnnnnnnnnnnnnnnnnnnnnnnnnnnnnnnnnnnnnnnnnnnnnnnnnnnnnnnnnnnnnnnnnnnnnnnnnnnnnnnnnnnnnnnnnnnnnnnnnnnnnnnnnnnnnnnnnnnnnnnnnnnnnnnnnnnnnnnnnnnnnnnnnnnnnnnnnnnnnnnnnnnnnnnnnnnnnnnnnnnnnnnnnnnnnnnnnnnnnnnnnnnnnnnnnnnnnnnnnnnnnnnnnnnnnnnnnnnnnnnnnnnnnnnnnnnnnnnnnnnnnnnnnnnnnnnnnnnnnnnnnnnnnnnnnnnnnnnnnnnnnnnnnnnnnnnnnnnnnnnnnnnnnnnnnnnnnnnnnnnnnnnnnnnnnnnnnnnnnnnnnnnnnnnnnnnnnnnnnnnnnnnnnnnnnnnnnnnnnnnnnnnnnnnnnnnnnnnnnnnnnnnnnnnnnnnnnnnnnnnnnnnnnnnnnnnnnnnnnnnnnnnnnnnnnnnnnnnnnnnnnnnnnnnnnnnnnnnnnnnnnnnnnnnnnnnnnnnnnnnnnnnnnnnnnnnnnnnnnnnnnnnnnnnnnnnnnnnnnnnnnnnnnnnnnnnnnnnnnnnnnnnnnnnnnnnnnnnnnnnnnnnnnnnnnnnnnnnnnnnnnnnnnnnnnnnnnnnnnnnnnnnnnnnnnnnnnnnnnnnnnnnnnnnnnnnnnnnnnnnnnnnnnnnnnnnnnnnnnnnnnnnnnnnnnnnnnnnnnnnnnnnnnnnnnnnnnnnnnnnnnnnnnnnnnnnnnnnnnnnnnnnnnnnnnnnnnnnnnnnnnnnnnnnnnnnnnnnnnnnnnnnnnnnnnnnnnnnnnnnnnnnnnnnnnnnnnnnnnnnnnnnnnnnnnnnnnnnnnnnnnnnnnnnnnnnnnnnnnnnnnnnnnnnnnnnnnnnnnnnnnnnnnnnnnnnnnnnnnnnnnnnnnnnnnnnnnnnnnnnnnnnnnnnnnnnnnnnnnnnnnnnnnnnnnnnnnnnnnnnnnnnnnnnnnnnnnnnnnnnnnnnnnnnnnnnnnnnnnnnnnnnnnnnnnnnnnnnnnnnnnnnnnnnnnnnnnnnnnnnnnnnnnnnnnnnnnnnnnnnnnnnnnnnnnnnnnnnnnnnnnnnnnnnnnnnnnnnnnnnnnnnnnnnnnnnnnnnnnnnnnnnnnnnnnnnnnnnnnnnnnnnnnnnnnnnnnnnnnnnnnnnnnnnnnnnnnnnnnnnnnnnnnnnnnnnnnnnnnnnnnnnnnnnnnnnnnnnnnnnnnnnnnnnnnnnnnnnnnnnnnnnnnnnnnnnnnnnnnnnnnnnnnnnnnnnnnnnnnnnnnnnnnnnnnnnnnnnnnnnnnnnnnnnnnnnnnnnnnnnnnnnnnnnnnnnnnnnnnnnnnnnnnnnnnnnnnnnnnnnnnnnnnnnnnnnnnnnnnnnnnnnnnnnnnnnnnnnnnnnnnnnnnnnnnnnnnnnnnnnnnnnnnnnnnnnnnnnnnnnnnnnnnnnnnnnnnnnnnnnnnnnnnnnnnnnnnnnnnnnnnnnnnnnnnnnnnnnnnnnnnnnnnnnnnnnnnnnnnnnnnnnnnnnnnnnnnnnnnnnnnnnnnnnnnnnnnnnnnnnnnnnnnnnnnnnnnnnnnnnnnnnnnnnnnnnnnnnnnnnnnnnnnnnnnnnnnnnnnnnnnnnnnnnnnnnnnnnnnnnnnnnnnnnnnnnnnnnnnnnnnnnnnnnnnnnnnnnnnnnnnnnnnnnnnnnnnnnnnnnnnnnnnnnnnnnnnnnnnnnnnnnnnnnnnnnnnnnnnnnnnnnnnnnnnnnnnnnnnnnnnnnnnnnnnnnnnnnnnnnnnnnnnnnnnnnnnnnnnnnnnnnnnnnnnnnnnnnnnnnnnnnnnnnnnnnnnnnnnnnnnnnnnnnnnnnnnnnnnnnnnnnnnnnnnnnnnnnnnnnnnnnnnnnnnnnnnnnnnnnnnnnnnnnnnnnnnnnnnnnnnnnnnnnnnnnnnnnnnnnnnnnnnnnnnnnnnnnnnnnnnnnnnnnnnnnnnnnnnnnnnnnnnnnnnnnnnnnnnnnnnnnnnnnnnnnnnnnnnnnnnnnnnnnnnnnnnnnnnnnnnnnnnnnnnnnnnnnnnnnnnnnnnnnnnnnnnnnnnnnnnnnnnnnnnnnnnnnnnnnnnnnnnnnnnnnnnnnnnnnnnnnnnnnnnnnnnnnnnnnnnnnnnnnnnnnnnnnnnnnnnnnnnnnnnnnnnnnnnnnnnnnnnnnnnnnnnnnnnnnnnnnnnnnnnnnnnnnnnnnnnnnnnnnnnnnnnnnnnnnnnnnnnnnnnnnnnnnnnnnnnnnnnnnnnnnnnnnnnnnnnnnnnnnnnnnnnnnnnnnnnnnnnnnnnnnnnnnnnnnnnnnnnnnnnnnnnnnnnnnnnnnnnnnnnnnnnnnnnnnnnnnnnnnnnnnnnnnnnnnnnnnnnnnnnnnnnnnnnnnnnnnnnnnnnnnnnnnnnnnnnnnnnnnnnnnnnnnnnnnnnnnnnnnnnnnnnnnnnnnnnnnnnnnnnnnnnnnnnnnnnnnnnnnnnnnnnnnnnnnnnnnnnnnnnnnnnnnnnnnnnnnnnnnnnnnnnnnnnnnnnnnnnnnnnnnnnnnnnnnnnnnnnnnnnnnnnnnnnnnnnnnnnnnnnnnnnnnnnnnnnnnnnnnnnnnnnnnnnnnnnnnnnnnnnnnnnnnnnnnnnnnnnnnnnnnnnnnnnnnnnnnnnnnnnnnnnnnnnnnnnnnnnnnnnnnnnnnnnnnnnnnnnnnnnnnnnnnnnnnnnnnnnnnnnnnnnnnnnnnnnnnnnnnnnnnnnnnnnnnnnnnnnnnnnnnnnnnnnnnnnnnnnnnnnnnnnnnnnnnnnnnnnnnnnnnnnnnnnnnnnnnnnnnnnnnnnnnnnnnnnnnnnnnnnnnnnnnnnnnnnnnnnnnnnnnnnnnnnnnnnnnnnnnnnnnnnnnnnnnnnnnnnnnnnnnnnnnnnnnnnnnnnnnnnnnnnnnnnnnnnnnnnnnnnnnnnnnnnnnnnnnnnnnnnnnnnnnnnnnnnnnnnnnnnnnnnnnnnnnnnnnnnnnnnnnnnnnnnnnnnnnnnnnnnnnnnnnnnnnnnnnnnnnnnnnnnnnnnnnnnnnnnnnnnnnnnnnnnnnnnnnnnnnnnnnnnnnnnnnnnnnnnnnnnnnnnnnnnnnnnnnnnnnnnnnnnnnnnnnnnnnnnnnnnnnnnnnnnnnnnnnnnnnnnnnnnnnnnnnnnnnnnnnnnnnnnnnnnnnnnnnnnnnnnnnnnnnnnnnnnnnnnnnnnnnnnnnnnnnnnnnnnnnnnnnnnnnnnnnnnnnnnnnnnnnnnnnnnnnnnnnnnnnnnnnnnnnnnnnnnnnnnnnnnnnnnnnnnnnnnnnnnnnnnnnnnnnnnnnnnnnnnnnnnnnnnnnnnnnnnnnnnnnnnnnnnnnnnnnnnnnnnnnnnnnnnnnnnnnnnnnnnnnnnnnnnnnnnnnnnnnnnnnnnnnnnnnnnnnnnnnnnnnnnnnnnnnnnnnnnnnnnnnnnnnnnnnnnnnnnnnnnnnnnnnnnnnnnnnnnnnnnnnnnnnnnnnnnnnnnnnnnnnnnnnnnnnnnnnnnnnnnnnnnnnnnnnnnnnnnnnnnnnnnnnnnnnnnnnnnnnnnnnnnnnnnnnnnnnnnnnnnnnnnnnnnnnnnnnnnnnnnnnnnnnnnnnnnnnnnnnnnnnnnnnnnnnnnnnnnnnnnnnnnnnnnnnnnnnnnnnnnnnnnnnnnnnnnnnnnnnnnnnnnnnnnnnnnnnnnnnnnnnnnnnnnnnnnnnnnnnnnnnnnnnnnnnnnnnnnnnnnnnnnnnnnnnnnnnnnnnnnnnnnnnnnnnnnnnnnnnnnnnnnnnnnnnnnnnnnnnnnnnnnnnnnnnnnnnnnnnnnnnnnnnnnnnnnnnnnnnnnnnnnnnnnnnnnnnnnnnnnnnnnnnnnnnnnnnnnnnnnnnnnnnnnnnnnnnnnnnnnnnnnnnnnnnnnnnnnnnnnnnnnnnnnnnnnnnnnnnnnnnnnnnnnnnnnnnnnnnnnnnnnnnnnnnnnnnnnnnnnnnnnnnnnnnnnnnnnnnnnnnnnnnnnnnnnnnnnnnnnnnnnnnnnnnnnnnnnnnnnnnnnnnnnnnnnnnnnnnnnnnnnnnnnnnnnnnnnnnnnnnnnnnnnnnnnnnnnnnnnnnnnnnnnnnnnnnnnnnnnnnnnnnnnnnnnnnnnnnnnnnnnnnnnnnnnnnnnnnnnnnnnnnnnnnnnnnnnnnnnnnnnnnnnnnnnnnnnnnnnnnnnnnnnnnnnnnnnnnnnnnnnnnnnnnnnnnnnnnnnnnnnnnnnnnnnnnnnnnnnnnnnnnnnnnnnnnnnnnnnnnnnnnnnnnnnnnnnnnnnnnnnnnnnnnnnnnnnnnnnnnnnnnnnnnnnnnnnnnnnnnnnnnnnnnnnnnnnnnnnnnnnnnnnnnnnnnnnnnnnnnnnnnnnnnnnnnnnnnnnnnnnnnnnnnnnnnnnnnnnnnnnnnnnnnnnnnnnnnnnnnnnnnnnnnnnnnnnnnnnnnnnnnnnnnnnnnnnnnnnnnnnnnnnnnnnnnnnnnnnnnnnnnnnnnnnnnnnnnnnnnnnnnnnnnnnnnnnnnnnnnnnnnnnnnnnnnnnnnnnnnnnnnnnnnnnnnnnnnnnnnnnnnnnnnnnnnnnnnnnnnnnnnnnnnnnnnnnnnnnnnnnnnnnnnnnnnnnnnnnnnnnnnnnnnnnnnnnnnnnnnnnnnnnnnnnnnnnnnnnnnnnnnnnnnnnnnnnnnnnnnnnnnnnnnnnnnnnnnnnnnnnnnnnnnnnnnnnnnnnnnnnnnnnnnnnnnnnnnnnnnnnnnnnnnnnnnnnnnnnnnnnnnnnnnnnnnnnnnnnnnnnnnnnnnnnnnnnnnnnnnnnnnnnnnnnnnnnnnnnnnnnnnnnnnnnnnnnnnnnnnnnnnnnnnnnnnnnnnnnnnnnnnnnnnnnnnnnnnnnnnnnnnnnnnnnnnnnnnnnnnnnnnnnnnnnnnnnnnnnnnnnnnnnnnnnnnnnnnnnnnnnnnnnnnnnnnnnnnnnnnnnnnnnnnnnnnnnnnnnnnnnnnnnnnnnnnnnnnnnnnnnnnnnnnnnnnnnnnnnnnnnnnnnnnnnnnnnnnnnnnnnnnnnnnnnnnnnnnnnnnnnnnnnnnnnnnnnnnnnnnnnnnnnnnnnnnnnnnnnnnnnnnnnnnnnnnnnnnnnnnnnnnnnnnnnnnnnnnnnnnnnnnnnnnnnnnnnnnnnnnnnnnnnnnnnnnnnnnnnnnnnnnnnnnnnnnnnnnnnnnnnnnnnnnnnnnnnnnnnnnnnnnnnnnnnnnnnnnnnnnnnnnnnnnnnnnnnnnnnnnnnnnnnnnnnnnnnnnnnnnnnnnnnnnnnnnnnnnnnnnnnnnnnnnnnnnnnnnnnnnnnnnnnnnnnnnnnnnnnnnnnnnnnnnnnnnnnnnnnnnnnnnnnnnnnnnnnnnnnnnnnnnnnnnnnnnnnnnnnnnnnnnnnnnnnnnnnnnnnnnnnnnnnnnnnnnnnnnnnnnnnnnnnnnnnnnnnnnnnnnnnnnnnnnnnnnnnnnnnnnnnnnnnnnnnnnnnnnnnnnnnnnnnnnnnnnnnnnnnnnnnnnnnnnnnnnnnnnnnnnnnnnnnnnnnnnnnnnnnnnnnnnnnnnnnnnnnnnnnnnnnnnnnnnnnnnnnnnnnnnnnnnnnnnnnnnnnnnnnnnnnnnnnnnnnnnnnnnnnnnnnnnnnnnnnnnnnnnnnnnnnnnnnnnnnnnnnnnnnnnnnnnnnnnnnnnnnnnnnnnnnnnnnnnnnnnnnnnnnnnnnnnnnnnnnnnnnnnnnnnnnnnnnnnnnnnnnnnnnnnnnnnnnnnnnnnnnnnnnnnnnnnnnnnnnnnnnnnnnnnnnnnnnnnnnnnnnnnnnnnnnnnnnnnnnnnnnnnnnnnnnnnnnnnnnnnnnnnnnnnnnnnnnnnnnnnnnnnnnnnnnnnnnnnnnnnnnnnnnnnnnnnnnnnnnnnnnnnnnnnnnnnnnnnnnnnnnnnnnnnnnnnnnnnnnnnnnnnnnnnnnnnnnnnnnnnnnnnnnnnnnnnnnnnnnnnnnnnnnnnnnnnnnnnnnnnnnnnnnnnnnnnnnnnnnnnnnnnnnnnnnnnnnnnnnnnnnnnnnnnnnnnnnnnnnnnnnnnnnnnnnnnnnnnnnnnnnnnnnnnnnnnnnnnnnnnnnnnnnnnnnnnnnnnnnnnnnnnnnnnnnnnnnnnnnnnnnnnnnnnnnnnnnnnnnnnnnnnnnnnnnnnnnnnnnnnnnnnnnnnnnnnnnnnnnnnnnnnnnnnnnnnnnnnnnnnnnnnnnnnnnnnnnnnnnnnnnnnnnnnnnnnnnnnnnnnnnnnnnnnnnnnnnnnnnnnnnnnnnnnnnnnnnnnnnnnnnnnnnnnnnnnnnnnnnnnnnnnnnnnnnnnnnnnnnnnnnnnnnnnnnnnnnnnnnnnnnnnnnnnnnnnnnnnnnnnnnnnnnnnnnnnnnnnnnnnnnnnnnnnnnnnnnnnnnnnnnnnnnnnnnnnnnnnnnnnnnnnnnnnnnnnnnnnnnnnnnnnnnnnnnnnnnnnnnnnnnnnnnnnnnnnnnnnnnnnnnnnnnnnnnnnnnnnnnnnnnnnnnnnnnnnnnnnnnnnnnnnnnnnnnnnnnnnnnnnnnnnnnnnnnnnnnnnnnnnnnnnnnnnnnnnnnnnnnnnnnnnnnnnnnnnnnnnnnnnnnnnnnnnnnnnnnnnnnnnnnnnnnnnnnnnnnnnnnnnnnnnnnnnnnnnnnnnnnnnnnnnnnnnnnnnnnnnnnnnnnnnnnnnnnnnnnnnnnnnnnnnnnnnnnnnnnnnnnnnnnnnnnnnnnnnnnnnnnnnnnnnnnnnnnnnnnnnnnnnnnnnnnnnnnnnnnnnnnnnnnnnnnnnnnnnnnnnnnnnnnnnnnnnnnnnnnnnnnnnnnnnnnnnnnnnnnnnnnnnnnnnnnnnnnnnnnnnnnnnnnnnnnnnnnnnnnnnnnnnnnnnnnnnnnnnnnnnnnnnnnnnnnnnnnnnnnnnnnnnnnnnnnnnnnnnnnnnnnnnnnnnnnnnnnnnnnnnnnnnnnnnnnnnnnnnnnnnnnnnnnnnnnnnnnnnnnnnnnnnnnnnnnnnnnnnnnnnnnnnnnnnnnnnnnnnnnnnnnnnnnnnnnnnnnnnnnnnnnnnnnnnnnnnnnnnnnnnnnnnnnnnnnnnnnnnnnnnnnnnnnnnnnnnnnnnnnnnnnnnnnnnnnnnnnnnnnnnnnnnnnnnnnnnnnnnnnnnnnnnnnnnnnnnnnnnnnnnnnnnnnnnnnnnnnnnnnnnnnnnnnnnnnnnnnnnnnnnnnnnnnnnnnnnnnnnnnnnnnnnnnnnnnnnnnnnnnnnnnnnnnnnnnnnnnnnnnnnnnnnnnnnnnnnnnnnnnnnnnnnnnnnnnnnnnnnnnnnnnnnnnnnnnnnnnnnnnnnnnnnnnnnnnnnnnnnnnnnnnnnnnnnnnnnnnnnnnnnnnnnnnnnnnnnnnnnnnnnnnnnnnnnnnnnnnnnnnnnnnnnnnnnnnnnnnnnnnnnnnnnnnnnnnnnnnnnnnnnnnnnnnnnnnnnnnnnnnnnnnnnnnnnnnnnnnnnnnnnnnnnnnnnnnnnnnnnnnnnnnnnnnnnnnnnnnnnnnnnnnnnnnnnnnnnnnnnnnnnnnnnnnnnnnnnnnnnnnnnnnnnnnnnnnnnnnnnnnnnnnnnnnnnnnnnnnnnnnnnnnnnnnnnnnnnnnnnnnnnnnnnnnnnnnnnnnnnnnnnnnnnnnnnnnnnnnnnnnnnnnnnnnnnnnnnnnnnnnnnnnnnnnnnnnnnnnnnnnnnnnnnnnnnnnnnnnnnnnnnnnnnnnnnnnnnnnnnnnnnnnnnnnnnnnnnnnnnnnnnnnnnnnnnnnnnnnnnnnnnnnnnnnnnnnnnnnnnnnnnnnnnnnnnnnnnnnnnnnnnnnnnnnnnnnnnnnnnnnnnnnnnnnnnnnnnnnnnnnnnnnnnnnnnnnnnnnnnnnnnnnnnnnnnnnnnnnnnnnnnnnnnnnnnnnnnnnnnnnnnnnnnnnnnnnnnnnnnnnnnnnnnnnnnnnnnnnnnnnnnnnnnnnnnnnnnnnnnnnnnnnnnnnnnnnnnnnnnnnnnnnnnnnnnnnnnnnnnnnnnnnnnnnnnnnnnnnnnnnnnnnnnnnnnnnnnnnnnnnnnnnnnnnnnnnnnnnnnnnnnnnnnnnnnnnnnnnnnnnnnnnnnnnnnnnnnnnnnnnnnnnnnnnnnnnnnnnnnnnnnnnnnnnnnnnnnnnnnnnnnnnnnnnnnnnnnnnnnnnnnnnnnnnnnnnnnnnnnnnnnnnnnnnnnnnnnnnnnnnnnnnnnnnnnnnnnnnnnnnnnnnnnnnnnnnnnnnnnnnnnnnnnnnnnnnnnnnnnnnnnnnnnnnnnnnnnnnnnnnnnnnnnnnnnnnnnnnnnnnnnnnnnnnnnnnnnnnnnnnnnnnnnnnnnnnnnnnnnnnnnnnnnnnnnnnnnnnnnnnnnnnnnnnnnnnnnnnnnnnnnnnnnnnnnnnnnnnnnnnnnnnnnnnnnnnnnnnnnnnnnnnnnnnnnnnnnnnnnnnnnnnnnnnnnnnnnnnnnnnnnnnnnnnnnnnnnnnnnnnnnnnnnnnnnnnnnnnnnnnnnnnnnnnnnnnnnnnnnnnnnnnnnnnnnnnnnnnnnnnnnnnnnnnnnnnnnnnnnnnnnnnnnnnnnnnnnnnnnnnnnnnnnnnnnnnnnnnnnnnnnnnnnnnnnnnnnnnnnnnnnnnnnnnnnnnnnnnnnnnnnnnnnnnnnnnnnnnnnnnnnnnnnnnnnnnnnnnnnnnnnnnnnnnnnnnnnnnnnnnnnnnnnnnnnnnnnnnnnnnnnnnnnnnnnnnnnnnnnnnnnnnnnnnnnnnnnnnnnnnnnnnnnnnnnnnnnnnnnnnnnnnnnnnnnnnnnnnnnnnnnnnnnnnnnnnnnnnnnnnnnnnnnnnnnnnnnnnnnnnnnnnnnnnnnnnnnnnnnnnnnnnnnnnnnnnnnnnnnnnnnnnnnnnnnnnnnnnnnnnnnnnnnnnnnnnnnnnnnnnnnnnnnnnnnnnnnnnnnnnnnnnnnnnnnnnnnnnnnnnnnnnnnnnnnnnnnnnnnnnnnnnnnnnnnnnnnnnnnnnnnnnnnnnnnnnnnnnnnnnnnnnnnnnnnnnnnnnnnnnnnnnnnnnnnnnnnnnnnnnnnnnnnnnnnnnnnnnnnnnnnnnnnnnnnnnnnnnnnnnnnnnnnnnnnnnnnnnnnnnnnnnnnnnnnnnnnnnnnnnnnnnnnnnnnnnnnnnnnnnnnnnnnnnnnnnnnnnnnnnnnnnnnnnnnnnnnnnnnnnnnnnnnnnnnnnnnnnnnnnnnnnnnnnnnnnnnnnnnnnnnnnnnnnnnnnnnnnnnnnnnnnnnnnnnnnnnnnnnnnnnnnnnnnnnnnnnnnnnnnnnnnnnnnnnnnnnnnnnnnnnnnnnnnnnnnnnnnnnnnnnnnnnnnnnnnnnnnnnnnnnnnnnnnnnnnnnnnnnnnnnnnnnnnnnnnnnnnnnnnnnnnnnnnnnnnnnnnnnnnnnnnnnnnnnnnnnnnnnnnnnnnnnnnnnnnnnnnnnnnnnnnnnnnnnnnnnnnnnnnnnnnnnnnnnnnnnnnnnnnnnnnnnnnnnnnnnnnnnnnnnnnnnnnnnnnnnnnnnnnnnnnnnnnnnnnnnnnnnnnnnnnnnnnnnnnnnnnnnnnnnnnnnnnnnnnnnnnnnnnnnnnnnnnnnnnnnnnnnnnnnnnnnnnnnnnnnnnnnnnnnnnnnnnnnnnnnnnnnnnnnnnnnnnnnnnnnnnnnnnnnnnnnnnnnnnnnnnnnnnnnnnnnnnnnnnnnnnnnnnnnnnnnnnnnnnnnnnnnnnnnnnnnnnnnnnnnnnnnnnnnnnnnnnnnnnnnnnnnnnnnnnnnnnnnnnnnnnnnnnnnnnnnnnnnnnnnnnnnnnnnnnnnnnnnnnnnnnnnnnnnnnnnnnnnnnnnnnnnnnnnnnnnnnnnnnnnnnnnnnnnnnnnnnnnnnnnnnnnnnnnnnnnnnnnnnnnnnnnnnnnnnnnnnnnnnnnnnnnnnnnnnnnnnnnnnnnnnnnnnnnnnnnnnnnnnnnnnnnnnnnnnnnnnnnnnnnnnnnnnnnnnnnnnnnnnnnnnnnnnnnnnnnnnnnnnnnnnnnnnnnnnnnnnnnnnnnnnnnnnnnnnnnnnnnnnnnnnnnnnnnnnnnnnnnnnnnnnnnnnnnnnnnnnnnnnnnnnnnnnnnnnnnnnnnnnnnnnnnnnnnnnnnnnnnnnnnnnnnnnnnnnnnnnnnnnnnnnnnnnnnnnnnnnnnnnnnnnnnnnnnnnnnnnnnnnnnnnnnnnnnnnnnnnnnnnnnnnnnnnnnnnnnnnnnnnnnnnnnnnnnnnnnnnnnnnnnnnnnnnnnnnnnnnnnnnnnnnnnnnnnnnnnnnnnnnnnnnnnnnnnnnnnnnnnnnnnnnnnnnnnnnnnnnnnnnnnnnnnnnnnnnnnnnnnnnnnnnnnnnnnnnnnnnnnnnnnnnnnnnnnnnnnnnnnnnnnnnnnnnnnnnnnnnnnnnnnnnnnnnnnnnnnnnnnnnnnnnnnnnnnnnnnnnnnnnnnnnnnnnnnnnnnnnnnnnnnnnnnnnnnnnnnnnnnnnnnnnnnnnnnnnnnnnnnnnnnnnnnnnnnnnnnnnnnnnnnnnnnnnnnnnnnnnnnnnnnnnnnnnnnnnnnnnnnnnnnnnnnnnnnnnnnnnnnnnnnnnnnnnnnnnnnnnnnnnnnnnnnnnnnnnnnnnnnnnnnnnnnnnnnnnnnnnnnnnnnnnnnnnnnnnnnnnnnnnnnnnnnnnnnnnnnnnnnnnnnnnnnnnnnnnnnnnnnnnnnnnnnnnnnnnnnnnnnnnnnnnnnnnnnnnnnnnnnnnnnnnnnnnnnnnnnnnnnnnnnnnnnnnnnnnnnnnnnnnnnnnnnnnnnnnnnnnnnnnnnnnnnnnnnnnnnnnnnnnnnnnnnnnnnnnnnnnnnnnnnnnnnnnnnnnnnnnnnnnnnnnnnnnnnnnnnnnnnnnnnnnnnnnnnnnnnnnnnnnnnnnnnnnnnnnnnnnnnnnnnnnnnnnnnnnnnnnnnnnnnnnnnnnnnnnnnnnnnnnnnnnnnnnnnnnnnnnnnnnnnnnnnnnnnnnnnnnnnnnnnnnnnnnnnnnnnnnnnnnnnnnnnnnnnnnnnnnnnnnnnnnnnnnnnnnnnnnnnnnnnnnnnnnnnnnnnnnnnnnnnnnnnnnnnnnnnnnnnnnnnnnnnnnnnnnnnnnnnnnnnnnnnnnnnnnnnnnnnnnnnnnnnnnnnnnnnnnnnnnnnnnnnnnnnnnnnnnnnnnnnnnnnnnnnnnnnnnnnnnnnnnnnnnnnnnnnnnnnnnnnnnnnnnnnnnnnnnnnnnnnnnnnnnnnnnnnnnnnnnnnnnnnnnnnnnnnnnnnnnnnnnnnnnnnnnnnnnnnnnnnnnnnnnnnnnnnnnnnnnnnnnnnnnnnnnnnnnnnnnnnnnnnnnnnnnnnnnnnnnnnnnnnnnnnnnnnnnnnnnnnnnnnnnnnnnnnnnnnnnnnnnnnnnnnnnnnnnnnnnnnnnnnnnnnnnnnnnnnnnnnnnnnnnnnnnnnnnnnnnnnnnnnnnnnnnnnnnnnnnnnnnnnnnnnnnnnnnnnnnnnnnnnnnnnnnnnnnnnnnnnnnnnnnnnnnnnnnnnnnnnnnnnnnnnnnnnnnnnnnnnnnnnnnnnnnnnnnnnnnnnnnnnnnnnnnnnnnnnnnnnnnnnnnnnnnnnnnnnnnnnnnnnnnnnnnnnnnnnnnnnnnnnnnnnnnnnnnnnnnnnnnnnnnnnnnnnnnnnnnnnnnnnnnnnnnnnnnnnnnnnnnnnnnnnnnnnnnnnnnnnnnnnnnnnnnnnnnnnnnnnnnnnnnnnnnnnnnnnnnnnnnnnnnnnnnnnnnnnnnnnnnnnnnnnnnnnnnnnnnnnnnnnnnnnnnnnnnnnnnnnnnnnnnnnnnnnnnnnnnnnnnnnnnnnnnnnnnnnnnnnnnnnnnnnnnnnnnnnnnnnnnnnnnnnnnnnnnnnnnnnnnnnnnnnnnnnnnnnnnnnnnnnnnnnnnnnnnnnnnnnnnnnnnnnnnnnnnnnnnnnnnnnnnnnnnnnnnnnnnnnnnnnnnnnnnnnnnnnnnnnnnnnnnnnnnnnnnnnnnnnnnnnnnnnnnnnnnnnnnnnnnnnnnnnnnnnnnnnnnnnnnnnnnnnnnnnnnnnnnnnnnnnnnnnnnnnnnnnnnnnnnnnnnnnnnnnnnnnnnnnnnnnnnnnnnnnnnnnnnnnnnnnnnnnnnnnnnnnnnnnnnnnnnnnnnnnnnnnnnnnnnnnnnnnnnnnnnnnnnnnnnnnnnnnnnnnnnnnnnnnnnnnnnnnnnnnnnnnnnnnnnnnnnnnnnnnnnnnnnnnnnnnnnnnnnnnnnnnnnnnnnnnnnnnnnnnnnnnnnnnnnnnnnnnnnnnnnnnnnnnnnnnnnnnnnnnnnnnnnnnnnnnnnnnnnnnnnnnnnnnnnnnnnnnnnnnnnnnnnnnnnnnnnnnnnnnnnnnnnnnnnnnnnnnnnnnnnnnnnnnnnnnnnnnnnnnnnnnnnnnnnnnnnnnnnnnnnnnnnnnnnnnnnnnnnnnnnnnnnnnnnnnnnnnnnnnnnnnnnnnnnnnnnnnnnnnnnnnnnnnnnnnnnnnnnnnnnnnnnnnnnnnnnnnnnnnnnnnnnnnnnnnnnnnnnnnnnnnnnnnnnnnnnnnnnnnnnnnnnnnnnnnnnnnnnnnnnnnnnnnnnnnnnnnnnnnnnnnnnnnnnnnnnnnnnnnnnnnnnnnnnnnnnnnnnnnnnnnnnnnnnnnnnnnnnnnnnnnnnnnnnnnnnnnnnnnnnnnnnnnnnnnnnnnnnnnnnnnnnnnnnnnnnnnnnnnnnnnnnnnnnnnnnnnnnnnnnnnnnnnnnnnnnnnnnnnnnnnnnnnnnnnnnnnnnnnnnnnnnnnnnnnnnnnnnnnnnnnnnnnnnnnnnnnnnnnnnnnnnnnnnnnnnnnnnnnnnnnnnnnnnnnnnnnnnnnnnnnnnnnnnnnnnnnnnnnnnnnnnnnnnnnnnnnnnnnnnnnnnnnnnnnnnnnnnnnnnnnnnnnnnnnnnnnnnnnnnnnnnnnnnnnnnnnnnnnnnnnnnnnnnnnnnnnnnnnnnnnnnnnnnnnnnnnnnnnnnnnnnnnnnnnnnnnnnnnnnnnnnnnnnnnnnnnnnnnnnnnnnnnnnnnnnnnnnnnnnnnnnnnnnnnnnnnnnnnnnnnnnnnnnnnnnnnnnnnnnnnnnnnnnnnnnnnnnnnnnnnnnnnnnnnnnnnnnnnnnnnnnnnnnnnnnnnnnnnnnnnnnnnnnnnnnnnnnnnnnnnnnnnnnnnnnnnnnnnnnnnnnnnnnnnnnnnnnnnnnnnnnnnnnnnnnnnnnnnnnnnnnnnnnnnnnnnnnnnnnnnnnnnnnnnnnnnnnnnnnnnnnnnnnnnnnnnnnnnnnnnnnnnnnnnnnnnnnnnnnnnnnnnnnnnnnnnnnnnnnnnnnnnnnnnnnnnnnnnnnnnnnnnnnnnnnnnnnnnnnnnnnnnnnnnnnnnnnnnnnnnnnnnnnnnnnnnnnnnnnnnnnnnnnnnnnnnnnnnnnnnnnnnnnnnnnnnnnnnnnnnnnnnnnnnnnnnnnnnnnnnnnnnnnnnnnnnnnnnnnnnnnnnnnnnnnnnnnnnnnnnnnnnnnnnnnnnnnnnnnnnnnnnnnnnnnnnnnnnnnnnnnnnnnnnnnnnnnnnnnnnnnnnnnnnnnnnnnnnnnnnnnnnnnnnnnnnnnnnnnnnnnnnnnnnnnnnnnnnnnnnnnnnnnnnnnnnnnnnnnnnnnnnnnnnnnnnnnnnnnnnnnnnnnnnnnnnnnnnnnnnnnnnnnnnnnnnnnnnnnnnnnnnnnnnnnnnnnnnnnnnnnnnnnnnnnnnnnnnnnnnnnnnnnnnnnnnnnnnnnnnnnnnnnnnnnnnnnnnnnnnnnnnnnnnnnnnnnnnnnnnnnnnnnnnnnnnnnnnnnnnnnnnnnnnnnnnnnnnnnnnnnnnnnnnnnnnnnnnnnnnnnnnnnnnnnnnnnnnnnnnnnnnnnnnnnnnnnnnnnnnnnnnnnnnnnnnnnnnnnnnnnnnnnnnnnnnnnnnnnnnnnnnnnnnnnnnnnnnnnnnnnnnnnnnnnnnnnnnnnnnnnnnnnnnnnnnnnnnnnnnnnnnnnnnnnnnnnnnnnnnnnnnnnnnnnnnnnnnnnnnnnnnnnnnnnnnnnnnnnnnnnnnnnnnnnnnnnnnnnnnnnnnnnnnnnnnnnnnnnnnnnnnnnnnnnnnnnnnnnnnnnnnnnnnnnnnnnnnnnnnnnnnnnnnnnnnnnnnnnnnnnnnnnnnnnnnnnnnnnnnnnnnnnnnnnnnnnnnnnnnnnnnnnnnnnnnnnnnnnnnnnnnnnnnnnnnnnnnnnnnnnnnnnnnnnnnnnnnnnnnnnnnnnnnnnnnnnnnnnnnnnnnnnnnnnnnnnnnnnnnnnnnnnnnnnnnnnnnnnnnnnnnnnnnnnnnnnnnnnnnnnnnnnnnnnnnnnnnnnnnnnnnnnnnnnnnnnnnnnnnnnnnnnnnnnnnnnnnnnnnnnnnnnnnnnnnnnnnnnnnnnnnnnnnnnnnnnnnnnnnnnnnnnnnnnnnnnnnnnnnnnnnnnnnnnnnnnnnnnnnnnnnnnnnnnnnnnnnnnnnnnnnnnnnnnnnnnnnnnnnnnnnnnnnnnnnnnnnnnnnnnnnnnnnnnnnnnnnnnnnnnnnnnnnnnnnnnnnnnnnnnnnnnnnnnnnnnnnnnnnnnnnnnnnnnnnnnnnnnnnnnnnnnnnnnnnnnnnnnnnnnnnnnnnnnnnnnnnnnnnnnnnnnnnnnnnnnnnnnnnnnnnnnnnnnnnnnnnnnnnnnnnnnnnnnnnnnnnnnnnnnnnnnnnnnnnnnnnnnnnnnnnnnnnnnnnnnnnnnnnnnnnnnnnnnnnnnnnnnnnnnnnnnnnnnnnnnnnnnnnnnnnnnnnnnnnnnnnnnnnnnnnnnnnnnnnnnnnnnnnnnnnnnnnnnnnnnnnnnnnnnnnnnnnnnnnnnnnnnnnnnnnnnnnnnnnnnnnnnnnnnnnnnnnnnnnnnnnnnnnnnnnnnnnnnnnnnnnnnnnnnnnnnnnnnnnnnnnnnnnnnnnnnnnnnnnnnnnnnnnnnnnnnnnnnnnnnnnnnnnnnnnnnnnnnnnnnnnnnnnnnnnnnnnnnnnnnnnnnnnnnnnnnnnnnnnnnnnnnnnnnnnnnnnnnnnnnnnnnnnnnnnnnnnnnnnnnnnnnnnnnnnnnnnnnnnnnnnnnnnnnnnnnnnnnnnnnnnnnnnnnnnnnnnnnnnnnnnnnnnnnnnnnnnnnnnnnnnnnnnnnnnnnnnnnnnnnnnnnnnnnnnnnnnnnnnnnnnnnnnnnnnnnnnnnnnnnnnnnnnnnnnnnnnnnnnnnnnnnnnnnnnnnnnnnnnnnnnnnnnnnnnnnnnnnnnnnnnnnnnnnnnnnnnnnnnnnnnnnnnnnnnnnnnnnnnnnnnnnnnnnnnnnnnnnnnnnnnnnnnnnnnnnnnnnnnnnnnnnnnnnnnnnnnnnnnnnnnnnnnnnnnnnnnnnnnnnnnnnnnnnnnnnnnnnnnnnnnnnnnnnnnnnnnnnnnnnnnnnnnnnnnnnnnnnnnnnnnnnnnnnnnnnnnnnnnnnnnnnnnnnnnnnnnnnnnnnnnnnnnnnnnnnnnnnnnnnnnnnnnnnnnnnnnnnnnnnnnnnnnnnnnnnnnnnnnnnnnnnnnnnnnnnnnnnnnnnnnnnnnnnnnnnnnnnnnnnnnnnnnnnnnnnnnnnnnnnnnnnnnnnnnnnnnnnnnnnnnnnnnnnnnnnnnnnnnnnnnnnnnnnnnnnnnnnnnnnnnnnnnnnnnnnnnnnnnnnnnnnnnnnnnnnnnnnnnnnnnnnnnnnnnnnnnnnnnnnnnnnnnnnnnnnnnnnnnnnnnnnnnnnnnnnnnnnnnnnnnnnnnnnnnnnnnnnnnnnnnnnnnnnnnnnnnnnnnnnnnnnnnnnnnnnnnnnnnnnnnnnnnnnnnnnnnnnnnnnnnnnnnnnnnnnnnnnnnnnnnnnnnnnnnnnnnnnnnnnnnnnnnnnnnnnnnnnnnnnnnnnnnnnnnnnnnnnnnnnnnnnnnnnnnnnnnnnnnnnnnnnnnnnnnnnnnnnnnnnnnnnnnnnnnnnnnnnnnnnnnnnnnnnnnnnnnnnnnnnnnnnnnnnnnnnnnnnnnnnnnnnnnnnnnnnnnnnnnnnnnnnnnnnnnnnnnnnnnnnnnnnnnnnnnnnnnnnnnnnnnnnnnnnnnnnnnnnnnnnnnnnnnnnnnnnnnnnnnnnnnnnnnnnnnnnnnnnnnnnnnnnnnnnnnnnnnnnnnnnnnnnnnnnnnnnnnnnnnnnnnnnnnnnnnnnnnnnnnnnnnnnnnnnnnnnnnnnnnnnnnnnnnnnnnnnnnnnnnnnnnnnnnnnnnnnnnnnnnnnnnnnnnnnnnnnnnnnnnnnnnnnnnnnnnnnnnnnnnnnnnnnnnnnnnnnnnnnnnnnnnnnnnnnnnnnnnnnnnnnnnnnnnnnnnnnnnnnnnnnnnnnnnnnnnnnnnnnnnnnnnnnnnnnnnnnnnnnnnnnnnnnnnnnnnnnnnnnnnnnnnnnnnnnnnnnnnnnnnnnnnnnnnnnnnnnnnnnnnnnnnnnnnnnnnnnnnnnnnnnnnnnnnnnnnnnnnnnnnnnnnnnnnnnnnnnnnnnnnnnnnnnnnnnnnnnnnnnnnnnnnnnnnnnnnnnnnnnnnnnnnnnnnnnnnnnnnnnnnnnnnnnnnnnnnnnnnnnnnnnnnnnnnnnnnnnnnnnnnnnnnnnnnnnnnnnnnnnnnnnnnnnnnnnnnnnnnnnnnnnnnnnnnnnnnnnnnnnnnnnnnnnnnnnnnnnnnnnnnnnnnnnnnnnnnnnnnnnnnnnnnnnnnnnnnnnnnnnnnnnnnnnnnnnnnnnnnnnnnnnnnnnnnnnnnnnnnnnnnnnnnnnnnnnnnnnnnnnnnnnnnnnnnnnnnnnnnnnnnnnnnnnnnnnnnnnnnnnnnnnnnnnnnnnnnnnnnnnnnnnnnnnnnnnnnnnnnnnnnnnnnnnnnnnnnnnnnnnnnnnnnnnnnnnnnnnnnnnnnnnnnnnnnnnnnnnnnnnnnnnnnnnnnnnnnnnnnnnnnnnnnnnnnnnnnnnnnnnnnnnnnnnnnnnnnnnnnnnnnnnnnnnnnnnnnnnnnnnnnnnnnnnnnnnnnnnnnnnnnnnnnnnnnnnnnnnnnnnnnnnnnnnnnnnnnnnnnnnnnnnnnnnnnnnnnnnnnnnnnnnnnnnnnnnnnnnnnnnnnnnnnnnnnnnnnnnnnnnnnnnnnnnnnnnnnnnnnnnnnnnnnnnnnnnnnnnnnnnnnnnnnnnnnnnnnnnnnnnnnnnnnnnnnnnnnnnnnnnnnnnnnnnnnnnnnnnnnnnnnnnnnnnnnnnnnnnnnnnnnnnnnnnnnnnnnnnnnnnnnnnnnnnnnnnnnnnnnnnnnnnnnnnnnnnnnnnnnnnnnnnnnnnnnnnnnnnnnnnnnnnnnnnnnnnnnnnnnnnnnnnnnnnnnnnnnnnnnnnnnnnnnnnnnnnnnnnnnnnnnnnnnnnnnnnnnnnnnnnnnnnnnnnnnnnnnnnnnnnnnnnnnnnnnnnnnnnnnnnnnnnnnnnnnnnnnnnnnnnnnnnnnnnnnnnnnnnnnnnnnnnnnnnnnnnnnnnnnnnnnnnnnnnnnnnnnnnnnnnnnnnnnnnnnnnnnnnnnnnnnnnnnnnnnnnnnnnnnnnnnnnnnnnnnnnnnnnnnnnnnnnnnnnnnnnnnnnnnnnnnnnnnnnnnnnnnnnnnnnnnnnnnnnnnnnnnnnnnnnnnnnnnnnnnnnnnnnnnnnnnnnnnnnnnnnnnnnnnnnnnnnnnnnnnnnnnnnnnnnnnnnnnnnnnnnnnnnnnnnnnnnnnnnnnnnnnnnnnnnnnnnnnnnnnnnnnnnnnnnnnnnnnnnnnnnnnnnnnnnnnnnnnnnnnnnnnnnnnnnnnnnnnnnnnnnnnnnnnnnnnnnnnnnnnnnnnnnnnnnnnnnnnnnnnnnnnnnnnnnnnnnnnnnnnnnnnnnnnnnnnnnnnnnnnnnnnnnnnnnnnnnnnnnnnnnnnnnnnnnnnnnnnnnnnnnnnnnnnnnnnnnnnnnnnnnnnnnnnnnnnnnnnnnnnnnnnnnnnnnnnnnnnnnnnnnnnnnnnnnnnnnnnnnnnnnnnnnnnnnnnnnnnnnnnnnnnnnnnnnnnnnnnnnnnnnnnnnnnnnnnnnnnnnnnnnnnnnnnnnnnnnnnnnnnnnnnnnnnnnnnnnnnnnnnnnnnnnnnnnnnnnnnnnnnnnnnnnnnnnnnnnnnnnnnnnnnnnnnnnnnnnnnnnnnnnnnnnnnnnnnnnnnnnnnnnnnnnnnnnnnnnnnnnnnnnnnnnnnnnnnnnnnnnnnnnnnnnnnnnnnnnnnnnnnnnnnnnnnnnnnnnnnnnnnnnnnnnnnnnnnnnnnnnnnnnnnnnnnnnnnnnnnnnnnnnnnnnnnnnnnnnnnnnnnnnnnnnnnnnnnnnnnnnnnnnnnnnnnnnnnnnnnnnnnnnnnnnnnnnnnnnnnnnnnnnnnnnnnnnnnnnnnnnnnnnnnnnnnnnnnnnnnnnnnnnnnnnnnnnnnnnnnnnnnnnnnnnnnnnnnnnnnnnnnnnnnnnnnnnnnnnnnnnnnnnnnnnnnnnnnnnnnnnnnnnnnnnnnnnnnnnnnnnnnnnnnnnnnnnnnnnnnnnnnnnnnnnnnnnnnnnnnnnnnnnnnnnnnnnnnnnnnnnnnnnnnnnnnnnnnnnnnnnnnnnnnnnnnnnnnnnnnnnnnnnnnnnnnnnnnnnnnnnnnnnnnnnnnnnnnnnnnnnnnnnnnnnnnnnnnnnnnnnnnnnnnnnnnnnnnnnnnnnnnnnnnnnnnnnnnnnnnnnnnnnnnnnnnnnnnnnnnnnnnnnnnnnnnnnnnnnnnnnnnnnnnnnnnnnnnnnnnnnnnnnnnnnnnnnnnnnnnnnnnnnnnnnnnnnnnnnnnnnnnnnnnnnnnnnnnnnnnnnnnnnnnnnnnnnnnnnnnnnnnnnnnnnnnnnnnnnnnnnnnnnnnnnnnnnnnnnnnnnnnnnnnnnnnnnnnnnnnnnnnnnnnnnnnnnnnnnnnnnnnnnnnnnnnnnnnnnnnnnnnnnnnnnnnnnnnnnnnnnnnnnnnnnnnnnnnnnnnnnnnnnnnnnnnnnnnnnnnnnnnnnnnnnnnnnnnnnnnnnnnnnnnnnnnnnnnnnnnnnnnnnnnnnnnnnnnnnnnnnnnnnnnnnnnnnnnnnnnnnnnnnnnnnnnnnnnnnnnnnnnnnnnnnnnnnnnnnnnnnnnnnnnnnnnnnnnnnnnnnnnnnnnnnnnnnnnnnnnnnnnnnnnnnnnnnnnnnnnnnnnnnnnnnnnnnnnnnnnnnnnnnnnnnnnnnnnnnnnnnnnnnnnnnnnnnnnnnnnnnnnnnnnnnnnnnnnnnnnnnnnnnnnnnnnnnnnnnnnnnnnnnnnnnnnnnnnnnnnnnnnnnnnnnnnnnnnnnnnnnnnnnnnnnnnnnnnnnnnnnnnnnnnnnnnnnnnnnnnnnnnnnnnnnnnnnnnnnnnnnnnnnnnnnnnnnnnnnnnnnnnnnnnnnnnnnnnnnnnnnnnnnnnnnnnnnnnnnnnnnnnnnnnnnnnnnnnnnnnnnnnnnnnnnnnnnnnnnnnnnnnnnnnnnnnnnnnnnnnnnnnnnnnnnnnnnnnnnnnnnnnnnnnnnnnnnnnnnnnnnnnnnnnnnnnnnnnnnnnnnnnnnnnnnnnnnnnnnnnnnnnnnnnnnnnnnnnnnnnnnnnnnnnnnnnnnnnnnnnnnnnnnnnnnnnnnnnnnnnnnnnnnnnnnnnnnnnnnnnnnnnnnnnnnnnnnnnnnnnnnnnnnnnnnnnnnnnnnnnnnnnnnnnnnnnnnnnnnnnnnnnnnnnnnnnnnnnnnnnnnnnnnnnnnnnnnnnnnnnnnnnnnnnnnnnnnnnnnnnnnnnnnnnnnnnnnnnnnnnnnnnnnnnnnnnnnnnnnnnnnnnnnnnnnnnnnnnnnnnnnnnnnnnnnnnnnnnnnnnnnnnnnnnnnnnnnnnnnnnnnnnnnnnnnnnnnnnnnnnnnnnnnnnnnnnnnnnnnnnnnnnnnnnnnnnnnnnnnnnnnnnnnnnnnnnnnnnnnnnnnnnnnnnnnnnnnnnnnnnnnnnnnnnnnnnnnnnnnnnnnnnnnnnnnnnnnnnnnnnnnnnnnnnnnnnnnnnnnnnnnnnnnnnnnnnnnnnnnnnnnnnnnnnnnnnnnnnnnnnnnnnnnnnnnnnnnnnnnnnnnnnnnnnnnnnnnnnnnnnnnnnnnnnnnnnnnnnnnnnnnnnnnnnnnnnnnnnnnnnnnnnnnnnnnnnnnnnnnnnnnnnnnnnnnnnnnnnnnnnnnnnnnnnnnnnnnnnnnnnnnnnnnnnnnnnnnnnnnnnnnnnnnnnnnnnnnnnnnnnnnnnnnnnnnnnnnnnnnnnnnnnnnnnnnnnnnnnnnnnnnnnnnnnnnnnnnnnnnnnnnnnnnnnnnnnnnnnnnnnnnnnnnnnnnnnnnnnnnnnnnnnnnnnnnnnnnnnnnnnnnnnnnnnnnnnnnnnnnnnnnnnnnnnnnnnnnnnnnnnnnnnnnnnnnnnnnnnnnnnnnnnnnnnnnnnnnnnnnnnnnnnnnnnnnnnnnnnnnnnnnnnnnnnnnnnnnnnnnnnnnnnnnnnnnnnnnnnnnnnnnnnnnnnnnnnnnnnnnnnnnnnnnnnnnnnnnnnnnnnnnnnnnnnnnnnnnnnnnnnnnnnnnnnnnnnnnnnnnnnnnnnnnnnnnnnnnnnnnnnnnnnnnnnnnnnnnnnnnnnnnnnnnnnnnnnnnnnnnnnnnnnnnnnnnnnnnnnnnnnnnnnnnnnnnnnnnnnnnnnnnnnnnnnnnnnnnnnnnnnnnnnnnnnnnnnnnnnnnnnnnnnnnnnnnnnnnnnnnnnnnnnnnnnnnnnnnnnnnnnnnnnnnnnnnnnnnnnnnnnnnnnnnnnnnnnnnnnnnnnnnnnnnnnnnnnnnnnnnnnnnnnnnnnnnnnnnnnnnnnnnnnnnnnnnnnnnnnnnnnnnnnnnnnnnnnnnnnnnnnnnnnnnnnnnnnnnnnnnnnnnnnnnnnnnnnnnnnnnnnnnnnnnnnnnnnnnnnnnnnnnnnnnnnnnnnnnnnnnnnnnnnnnnnnnnnnnnnnnnnnnnnnnnnnnnnnnnnnnnnnnnnnnnnnnnnnnnnnnnnnnnnnnnnnnnnnnnnnnnnnnnnnnnnnnnnnnnnnnnnnnnnnnnnnnnnnnnnnnnnnnnnnnnnnnnnnnnnnnnnnnnnnnnnnnnnnnnnnnnnnnnnnnnnnnnnnnnnnnnnnnnnnnnnnnnnnnnnnnnnnnnnnnnnnnnnnnnnnnnnnnnnnnnnnnnnnnnnnnnnnnnnnnnnnnnnnnnnnnnnnnnnnnnnnnnnnnnnnnnnnnnnnnnnnnnnnnnnnnnnnnnnnnnnnnnnnnnnnnnnnnnnnnnnnnnnnnnnnnnnnnnnnnnnnnnnnnnnnnnnnnnnnnnnnnnnnnnnnnnnnnnnnnnnnnnnnnnnnnnnnnnnnnnnnnnnnnnnnnnnnnnnnnnnnnnnnnnnnnnnnnnnnnnnnnnnnnnnnnnnnnnnnnnnnnnnnnnnnnnnnnnnnnnnnnnnnnnnnnnnnnnnnnnnnnnnnnnnnnnnnnnnnnnnnnnnnnnnnnnnnnnnnnnnnnnnnnnnnnnnnnnnnnnnnnnnnnnnnnnnnnnnnnnnnnnnnnnnnnnnnnnnnnnnnnnnnnnnnnnnnnnnnnnnnnnnnnnnnnnnnnnnnnnnnnnnnnnnnnnnnnnnnnnnnnnnnnnnnnnnnnnnnnnnnnnnnnnnnnnnnnnnnnnnnnnnnnnnnnnnnnnnnnnnnnnnnnnnnnnnnnnnnnnnnnnnnnnnnnnnnnnnnnnnnnnnnnnnnnnnnnnnnnnnnnnnnnnnnnnnnnnnnnnnnnnnnnnnnnnnnnnnnnnnnnnnnnnnnnnnnnnnnnnnnnnnnnnnnnnnnnnnnnnnnnnnnnnnnnnnnnnnnnnnnnnnnnnnnnnnnnnnnnnnnnnnnnnnnnnnnnnnnnnnnnnnnnnnnnnnnnnnnnnnnnnnnnnnnnnnnnnnnnnnnnnnnnnnnnnnnnnnnnnnnnnnnnnnnnnnnnnnnnnnnnnnnnnnnnnnnnnnnnnnnnnnnnnnnnnnnnnnnnnnnnnnnnnnnnnnnnnnnnnnnnnnnnnnnnnnnnnnnnnnnnnnnnnnnnnnnnnnnnnnnnnnnnnnnnnnnnnnnnnnnnnnnnnnnnnnnnnnnnnnnnnnnnnnnnnnnnnnnnnnnnnnnnnnnnnnnnnnnnnnnnnnnnnnnnnnnnnnnnnnnnnnnnnnnnnnnnnnnnnnnnnnnnnnnnnnnnnnnnnnnnnnnnnnnnnnnnnnnnnnnnnnnnnnnnnnnnnnnnnnnnnnnnnnnnnnnnnnnnnnnnnnnnnnnnnnnnnnnnnnnnnnnnnnnnnnnnnnnnnnnnnnnnnnnnnnnnnnnnnnnnnnnnnnnnnnnnnnnnnnnnnnnnnnnnnnnnnnnnnnnnnnnnnnnnnnnnnnnnnnnnnnnnnnnnnnnnnnnnnnnnnnnnnnnnnnnnnnnnnnnnnnnnnnnnnnnnnnnnnnnnnnnnnnnnnnnnnnnnnnnnnnnnnnnnnnnnnnnnnnnnnnnnnnnnnnnnnnnnnnnnnnnnnnnnnnnnnnnnnnnnnnnnnnnnnnnnnnnnnnnnnnnnnnnnnnnnnnnnnnnnnnnnnnnnnnnnnnnnnnnnnnnnnnnnnnnnnnnnnnnnnnnnnnnnnnnnnnnnnnnnnnnnnnnnnnnnnnnnnnnnnnnnnnnnnnnnnnnnnnnnnnnnnnnnnnnnnnnnnnnnnnnnnnnnnnnnnnnnnnnnnnnnnnnnnnnnnnnnnnnnnnnnnnnnnnnnnnnnnnnnnnnnnnnnnnnnnnnnnnnnnnnnnnnnnnnnnnnnnnnnnnnnnnnnnnnnnnnnnnnnnnnnnnnnnnnnnnnnnnnnnnnnnnnnnnnnnnnnnnnnnnnnnnnnnnnnnnnnnnnnnnnnnnnnnnnnnnnnnnnnnnnnnnnnnnnnnnnnnnnnnnnnnnnnnnnnnnnnnnnnnnnnnnnnnnnnnnnnnnnnnnnnnnnnnnnnnnnnnnnnnnnnnnnnnnnnnnnnnnnnnnnnnnnnnnnnnnnnnnnnnnnnnnnnnnnnnnnnnnnnnnnnnnnnnnnnnnnnnnnnnnnnnnnnnnnnnnnnnnnnnnnnnnnnnnnnnnnnnnnnnnnnnnnnnnnnnnnnnnnnnnnnnnnnnnnnnnnnnnnnnnnnnnnnnnnnnnnnnnnnnnnnnnnnnnnnnnnnnnnnnnnnnnnnnnnnnnnnnnnnnnnnnnnnnnnnnnnnnnnnnnnnnnnnnnnnnnnnnnnnnnnnnnnnnnnnnnnnnnnnnnnnnnnnnnnnnnnnnnnnnnnnnnnnnnnnnnnnnnnnnnnnnnnnnnnnnnnnnnnnnnnnnnnnnnnnnnnnnnnnnnnnnnnnnnnnnnnnnnnnnnnnnnnnnnnnnnnnnnnnnnnnnnnnnnnnnnnnnnnnnnnnnnnnnnnnnnnnnnnnnnnnnnnnnnnnnnnnnnnnnnnnnnnnnnnnnnnnnnnnnnnnnnnnnnnnnnnnnnnnnnnnnnnnnnnnnnnnnnnnnnnnnnnnnnnnnnnnnnnnnnnnnnnnnnnnnnnnnnnnnnnnnnnnnnnnnnnnnnnnnnnnnnnnnnnnnnnnnnnnnnnnnnnnnnnnnnnnnnnnnnnnnnnnnnnnnnnnnnnnnnnnnnnnnnnnnnnnnnnnnnnnnnnnnnnnnnnnnnnnnnnnnnnnnnnnnnnnnnnnnnnnnnnnnnnnnnnnnnnnnnnnnnnnnnnnnnnnnnnnnnnnnnnnnnnnnnnnnnnnnnnnnnnnnnnnnnnnnnnnnnnnnnnnnnnnnnnnnnnnnnnnnnnnnnnnnnnnnnnnnnnnnnnnnnnnnnnnnnnnnnnnnnnnnnnnnnnnnnnnnnnnnnnnnnnnnnnnnnnnnnnnnnnnnnnnnnnnnnnnnnnnnnnnnnnnnnnnnnnnnnnnnnnnnnnnnnnnnnnnnnnnnnnnnnnnnnnnnnnnnnnnnnnnnnnnnnnnnnnnnnnnnnnnnnnnnnnnnnnnnnnnnnnnnnnnnnnnnnnnnnnnnnnnnnnnnnnnnnnnnnnnnnnnnnnnnnnnnnnnnnnnnnnnnnnnnnnnnnnnnnnnnnnnnnnnnnnnnnnnnnnnnnnnnnnnnnnnnnnnnnnnnnnnnnnnnnnnnnnnnnnnnnnnnnnnnnnnnnnnnnnnnnnnnnnnnnnnnnnnnnnnnnnnnnnnnnnnnnnnnnnnnnnnnnnnnnnnnnnnnnnnnnnnnnnnnnnnnnnnnnnnnnnnnnnnnnnnnnnnnnnnnnnnnnnnnnnnnnnnnnnnnnnnnnnnnnnnnnnnnnnnnnnnnnnnnnnnnnnnnnnnnnnnnnnnnnnnnnnnnnnnnnnnnnnnnnnnnnnnnnnnnnnnnnnnnnnnnnnnnnnnnnnnnnnnnnnnnnnnnnnnnnnnnnnnnnnnnnnnnnnnnnnnnnnnnnnnnnnnnnnnnnnnnnnnnnnnnnnnnnnnnnnnnnnnnnnnnnnnnnnnnnnnnnnnnnnnnnnnnnnnnnnnnnnnnnnnnnnnnnnnnnnnnnnnnnnnnnnnnnnnnnnnnnnnnnnnnnnnnnnnnnnnnnnnnnnnnnnnnnnnnnnnnnnnnnnnnnnnnnnnnnnnnnnnnnnnnnnnnnnnnnnnnnnnnnnnnnnnnnnnnnnnnnnnnnnnnnnnnnnnnnnnnnnnnnnnnnnnnnnnnnnnnnnnnnnnnnnnnnnnnnnnnnnnnnnnnnnnnnnnnnnnnnnnnnnnnnnnnnnnnnnnnnnnnnnnnnnnnnnnnnnnnnnnnnnnnnnnnnnnnnnnnnnnnnnnnnnnnnnnnnnnnnnnnnnnnnnnnnnnnnnnnnnnnnnnnnnnnnnnnnnnnnnnnnnnnnnnnnnnnnnnnnnnnnnnnnnnnnnnnnnnnnnnnnnnnnnnnnnnnnnnnnnnnnnnnnnnnnnnnnnnnnnnnnnnnnnnnnnnnnnnnnnnnnnnnnnnnnnnnnnnnnnnnnnnnnnnnnnnnnnnnnnnnnnnnnnnnnnnnnnnnnnnnnnnnnnnnnnnnnnnnnnnnnnnnnnnnnnnnnnnnnnnnnnnnnnnnnnnnnnnnnnnnnnnnnnnnnnnnnnnnnnnnnnnnnnnnnnnnnnnnnnnnnnnnnnnnnnnnnnnnnnnnnnnnnnnnnnnnnnnnnnnnnnnnnnnnnnnnnnnnnnnnnnnnnnnnnnnnnnnnnnnnnnnnnnnnnnnnnnnnnnnnnnnnnnnnnnnnnnnnnnnnnnnnnnnnnnnnnnnnnnnnnnnnnnnnnnnnnnnnnnnnnnnnnnnnnnnnnnnnnnnnnnnnnnnnnnnnnnnnnnnnnnnnnnnnnnnnnnnnnnnnnnnnnnnnnnnnnnnnnnnnnnnnnnnnnnnnnnnnnnnnnnnnnnnnnnnnnnnnnnnnnnnnnnnnnnnnnnnnnnnnnnnnnnnnnnnnnnnnnnnnnnnnnnnnnnnnnnnnnnnnnnnnnnnnnnnnnnnnnnnnnnnnnnnnnnnnnnnnnnnnnnnnnnnnnnnnnnnnnnnnnnnnnnnnnnnnnnnnnnnnnnnnnnnnnnnnnnnnnnnnnnnnnnnnnnnnnnnnnnnnnnnnnnnnnnnnnnnnnnnnnnnnnnnnnnnnnnnnnnnnnnnnnnnnnnnnnnnnnnnnnnnnnnnnnnnnnnnnnnnnnnnnnnnnnnnnnnnnnnnnnnnnnnnnnnnnnnnnnnnnnnnnnnnnnnnnnnnnnnnnnnnnnnnnnnnnnnnnnnnnnnnnnnnnnnnnnnnnnnnnnnnnnnnnnnnnnnnnnnnnnnnnnnnnnnnnnnnnnnnnnnnnnnnnnnnnnnnnnnnnnnnnnnnnnnnnnnnnnnnnnnnnnnnnnnnnnnnnnnnnnnnnnnnnnnnnnnnnnnnnnnnnnnnnnnnnnnnnnnnnnnnnnnnnnnnnnnnnnnnnnnnnnnnnnnnnnnnnnnnnnnnnnnnnnnnnnnnnnnnnnnnnnnnnnnnnnnnnnnnnnnnnnnnnnnnnnnnnnnnnnnnnnnnnnnnnnnnnnnnnnnnnnnnnnnnnnnnnnnnnnnnnnnnnnnnnnnnnnnnnnnnnnnnnnnnnnnnnnnnnnnnnnnnnnnnnnnnnnnnnnnnnnnnnnnnnnnnnnnnnnnnnnnnnnnnnnnnnnnnnnnnnnnnnnnnnnnnnnnnnnnnnnnnnnnnnnnnnnnnnnnnnnnnnnnnnnnnnnnnnnnnnnnnnnnnnnnnnnnnnnnnnnnnnnnnnnnnnnnnnnnnnnnnnnnnnnnnnnnnnnnnnnnnnnnnnnnnnnnnnnnnnnnnnnnnnnnnnnnnnnnnnnnnnnnnnnnnnnnnnnnnnnnnnnnnnnnnnnnnnnnnnnnnnnnnnnnnnnnnnnnnnnnnnnnnnnnnnnnnnnnnnnnnnnnnnnnnnnnnnnnnnnnnnnnnnnnnnnnnnnnnnnnnnnnnnnnnnnnnnnnnnnnnnnnnnnnnnnnnnnnnnnnnnnnnnnnnnnnnnnnnnnnnnnnnnnnnnnnnnnnnnnnnnnnnnnnnnnnnnnnnnnnnnnnnnnnnnnnnnnnnnnnnnnnnnnnnnnnnnnnnnnnnnnnnnnnnnnnnnnnnnnnnnnnnnnnnnnnnnnnnnnnnnnnnnnnnnnnnnnnnnnnnnnnnnnnnnnnnnnnnnnnnnnnnnnnnnnnnnnnnnnnnnnnnnnnnnnnnnnnnnnnnnnnnnnnnnnnnnnnnnnnnnnnnnnnnnnnnnnnnnnnnnnnnnnnnnnnnnnnnnnnnnnnnnnnnnnnnnnnnnnnnnnnnnnnnnnnnnnnnnnnnnnnnnnnnnnnnnnnnnnnnnnnnnnnnnnnnnnnnnnnnnnnnnnnnnnnnnnnnnnnnnnnnnnnnnnnnnnnnnnnnnnnnnnnnnnnnnnnnnnnnnnnnnnnnnnnnnnnnnnnnnnnnnnnnnnnnnnnnnnnnnnnnnnnnnnnnnnnnnnnnnnnnnnnnnnnnnnnnnnnnnnnnnnnnnnnnnnnnnnnnnnnnnnnnnnnnnnnnnnnnnnnnnnnnnnnnnnnnnnnnnnnnnnnnnnnnnnnnnnnnnnnnnnnnnnnnnnnnnnnnnnnnnnnnnnnnnnnnnnnnnnnnnnnnnnnnnnnnnnnnnnnnnnnnnnnnnnnnnnnnnnnnnnnnnnnnnnnnnnnnnnnnnnnnnnnnnnnnnnnnnnnnnnnnnnnnnnnnnnnnnnnnnnnnnnnnnnnnnnnnnnnnnnnnnnnnnnnnnnnnnnnnnnnnnnnnnnnnnnnnnnnnnnnnnnnnnnnnnnnnnnnnnnnnnnnnnnnnnnnnnnnnnnnnnnnnnnnnnnnnnnnnnnnnnnnnnnnnnnnnnnnnnnnnnnnnnnnnnnnnnnnnnnnnnnnnnnnnnnnnnnnnnnnnnnnnnnnnnnnnnnnnnnnnnnnnnnnnnnnnnnnnnnnnnnnnnnnnnnnnnnnnnnnnnnnnnnnnnnnnnnnnnnnnnnnnnnnnnnnnnnnnnnnnnnnnnnnnnnnnnnnnnnnnnnnnnnnnnnnnnnnnnnnnnnnnnnnnnnnnnnnnnnnnnnnnnnnnnnnnnnnnnnnnnnnnnnnnnnnnnnnnnnnnnnnnnnnnnnnnnnnnnnnnnnnnnnnnnnnnnnnnnnnnnnnnnnnnnnnnnnnnnnnnnnnnnnnnnnnnnnnnnnnnnnnnnnnnnnnnnnnnnnnnnnnnnnnnnnnnnnnnnnnnnnnnnnnnnnnnnnnnnnnnnnnnnnnnnnnnnnnnnnnnnnnnnnnnnnnnnnnnnnnnnnnnnnnnnnnnnnnnnnnnnnnnnnnnnnnnnnnnnnnnnnnnnnnnnnnnnnnnnnnnnnnnnnnnnnnnnnnnnnnnnnnnnnnnnnnnnnnnnnnnnnnnnnnnnnnnnnnnnnnnnnnnnnnnnnnnnnnnnnnnnnnnnnnnnnnnnnnnnnnnnnnnnnnnnnnnnnnnnnnnnnnnnnnnnnnnnnnnnnnnnnnnnnnnnnnnnnnnnnnnnnnnnnnnnnnnnnnnnnnnnnnnnnnnnnnnnnnnnnnnnnnnnnnnnnnnnnnnnnnnnnnnnnnnnnnnnnnnnnnnnnnnnnnnnnnnnnnnnnnnnnnnnnnnnnnnnnnnnnnnnnnnnnnnnnnnnnnnnnnnnnnnnnnnnnnnnnnnnnnnnnnnnnnnnnnnnnnnnnnnnnnnnnnnnnnnnnnnnnnnnnnnnnnnnnnnnnnnnnnnnnnnnnnnnnnnnnnnnnnnnnnnnnnnnnnnnnnnnnnnnnnnnnnnnnnnnnnnnnnnnnnnnnnnnnnnnnnnnnnnnnnnnnnnnnnnnnnnnnnnnnnnnnnnnnnnnnnnnnnnnnnnnnnnnnnnnnnnnnnnnnnnnnnnnnnnnnnnnnnnnnnnnnnnnnnnnnnnnnnnnnnnnnnnnnnnnnnnnnnnnnnnnnnnnnnnnnnnnnnnnnnnnnnnnnnnnnnnnnnnnnnnnnnnnnnnnnnnnnnnnnnnnnnnnnnnnnnnnnnnnnnnnnnnnnnnnnnnnnnnnnnnnnnnnnnnnnnnnnnnnnnnnnnnnnnnnnnnnnnnnnnnnnnnnnnnnnnnnnnnnnnnnnnnnnnnnnnnnnnnnnnnnnnnnnnnnnnnnnnnnnnnnnnnnnnnnnnnnnnnnnnnnnnnnnnnnnnnnnnnnnnnnnnnnnnnnnnnnnnnnnnnnnnnnnnnnnnnnnnnnnnnnnnnnnnnnnnnnnnnnnnnnnnnnnnnnnnnnnnnnnnnnnnnnnnnnnnnnnnnnnnnnnnnnnnnnnnnnnnnnnnnnnnnnnnnnnnnnnnnnnnnnnnnnnnnnnnnnnnnnnnnnnnnnnnnnnnnnnnnnnnnnnnnnnnnnnnnnnnnnnnnnnnnnnnnnnnnnnnnnnnnnnnnnnnnnnnnnnnnnnnnnnnnnnnnnnnnnnnnnnnnnnnnnnnnnnnnnnnnnnnnnnnnnnnnnnnnnnnnnnnnnnnnnnnnnnnnnnnnnnnnnnnnnnnnnnnnnnnnnnnnnnnnnnnnnnnnnnnnnnnnnnnnnnnnnnnnnnnnnnnnnnnnnnnnnnnnnnnnnnnnnnnnnnnnnnnnnnnnnnnnnnnnnnnnnnnnnnnnnnnnnnnnnnnnnnnnnnnnnnnnnnnnnnnnnnnnnnnnnnnnnnnnnnnnnnnnnnnnnnnnnnnnnnnnnnnnnnnnnnnnnnnnnnnnnnnnnnnnnnnnnnnnnnnnnnnnnnnnnnnnnnnnnnnnnnnnnnnnnnnnnnnnnnnnnnnnnnnnnnnnnnnnnnnnnnnnnnnnnnnnnnnnnnnnnnnnnnnnnnnnnnnnnnnnnnnnnnnnnnnnnnnnnnnnnnnnnnnnnnnnnnnnnnnnnnnnnnnnnnnnnnnnnnnnnnnnnnnnnnnnnnnnnnnnnnnnnnnnnnnnnnnnnnnnnnnnnnnnnnnnnnnnnnnnnnnnnnnnnnnnnnnnnnnnnnnnnnnnnnnnnnnnnnnnnnnnnnnnnnnnnnnnnnnnnnnnnnnnnnnnnnnnnnnnnnnnnnnnnnnnnnnnnnnnnnnnnnnnnnnnnnnnnnnnnnnnnnnnnnnnnnnnnnnnnnnnnnnnnnnnnnnnnnnnnnnnnnnnnnnnnnnnnnnnnnnnnnnnnnnnnnnnnnnnnnnnnnnnnnnnnnnnnnnnnnnnnnnnnnnnnnnnnnnnnnnnnnnnnnnnnnnnnnnnnnnnnnnnnnnnnnnnnnnnnnnnnnnnnnnnnnnnnnnnnnnnnnnnnnnnnnnnnnnnnnnnnnnnnnnnnnnnnnnnnnnnnnnnnnnnnnnnnnnnnnnnnnnnnnnnnnnnnnnnnnnnnnnnnnnnnnnnnnnnnnnnnnnnnnnnnnnnnnnnnnnnnnnnnnnnnnnnnnnnnnnnnnnnnnnnnnnnnnnnnnnnnnnnnnnnnnnnnnnnnnnnnnnnnnnnnnnnnnnnnnnnnnnnnnnnnnnnnnnnnnnnnnnnnnnnnnnnnnnnnnnnnnnnnnnnnnnnnnnnnnnnnnnnnnnnnnnnnnnnnnnnnnnnnnnnnnnnnnnnnnnnnnnnnnnnnnnnnnnnnnnnnnnnnnnnnnnnnnnnnnnnnnnnnnnnnnnnnnnnnnnnnnnnnnnnnnnnnnnnnnnnnnnnnnnnnnnnnnnnnnnnnnnnnnnnnnnnnnnnnnnnnnnnnnnnnnnnnnnnnnnnnnnnnnnnnnnnnnnnnnnnnnnnnnnnnnnnnnnnnnnnnnnnnnnnnnnnnnnnnnnnnnnnnnnnnnnnnnnnnnnnnnnnnnnnnnnnnnnnnnnnnnnnnnnnnnnnnnnnnnnnnnnnnnnnnnnnnnnnnnnnnnnnnnnnnnnnnnnnnnnnnnnnnnnnnnnnnnnnnnnnnnnnnnnnnnnnnnnnnnnnnnnnnnnnnnnnnnnnnnnnnnnnnnnnnnnnnnnnnnnnnnnnnnnnnnnnnnnnnnnnnnnnnnnnnnnnnnnnnnnnnnnnnnnnnnnnnnnnnnnnnnnnnnnnnnnnnnnnnnnnnnnnnnnnnnnnnnnnnnnnnnnnnnnnnnnnnnnnnnnnnnnnnnnnnnnnnnnnnnnnnnnnnnnnnnnnnnnnnnnnnnnnnnnnnnnnnnnnnnnnnnnnnnnnnnnnnnnnnnnnnnnnnnnnnnnnnnnnnnnnnnnnnnnnnnnnnnnnnnnnnnnnnnnnnnnnnnnnnnnnnnnnnnnnnnnnnnnnnnnnnnnnnnnnnnnnnnnnnnnnnnnnnnnnnnnnnnnnnnnnnnnnnnnnnnnnnnnnnnnnnnnnnnnnnnnnnnnnnnnnnnnnnnnnnnnnnnnnnnnnnnnnnnnnnnnnnnnnnnnnnnnnnnnnnnnnnnnnnnnnnnnnnnnnnnnnnnnnnnnnnnnnnnnnnnnnnnnnnnnnnnnnnnnnnnnnnnnnnnnnnnnnnnnnnnnnnnnnnnnnnnnnnnnnnnnnnnnnnnnnnnnnnnnnnnnnnnnnnnnnnnnnnnnnnnnnnnnnnnnnnnnnnnnnnnnnnnnnnnnnnnnnnnnnnnnnnnnnnnnnnnnnnnnnnnnnnnnnnnnnnnnnnnnnnnnnnnnnnnnnnnnnnnnnnnnnnnnnnnnnnnnnnnnnnnnnnnnnnnnnnnnnnnnnnnnnnnnnnnnnnnnnnnnnnnnnnnnnnnnnnnnnnnnnnnnnnnnnnnnnnnnnnnnnnnnnnnnnnnnnnnnnnnnnnnnnnnnnnnnnnnnnnnnnnnnnnnnnnnnnnnnnnnnnnnnnnnnnnnnnnnnnnnnnnnnnnnnnnnnnnnnnnnnnnnnnnnnnnnnnnnnnnnnnnnnnnnnnnnnnnnnnnnnnnnnnnnnnnnnnnnnnnnnnnnnnnnnnnnnnnnnnnnnnnnnnnnnnnnnnnnnnnnnnnnnnnnnnnnnnnnnnnnnnnnnnnnnnnnnnnnnnnnnnnnnnnnnnnnnnnnnnnnnnnnnnnnnnnnnnnnnnnnnnnnnnnnnnnnnnnnnnnnnnnnnnnnnnnnnnnnnnnnnnnnnnnnnnnnnnnnnnnnnnnnnnnnnnnnnnnnnnnnnnnnnnnnnnnnnnnnnnnnnnnnnnnnnnnnnnnnnnnnnnnnnnnnnnnnnnnnnnnnnnnnnnnnnnnnnnnnnnnnnnnnnnnnnnnnnnnnnnnnnnnnnnnnnnnnnnnnnnnnnnnnnnnnnnnnnnnnnnnnnnnnnnnnnnnnnnnnnnnnnnnnnnnnnnnnnnnnnnnnnnnnnnnnnnnnnnnnnnnnnnnnnnnnnnnnnnnnnnnnnnnnnnnnnnnnnnnnnnnnnnnnnnnnnnnnnnnnnnnnnnnnnnnnnnnnnnnnnnnnnnnnnnnnnnnnnnnnnnnnnnnnnnnnnnnnnnnnnnnnnnnnnnnnnnnnnnnnnnnnnnnnnnnnnnnnnnnnnnnnnnnnnnnnnnnnnnnnnnnnnnnnnnnnnnnnnnnnnnnnnnnnnnnnnnnnnnnnnnnnnnnnnnnnnnnnnnnnnnnnnnnnnnnnnnnnnnnnnnnnnnnnnnnnnnnnnnnnnnnnnnnnnnnnnnnnnnnnnnnnnnnnnnnnnnnnnnnnnnnnnnnnnnnnnnnnnnnnnnnnnnnnnnnnnnnnnnnnnnnnnnnnnnnnnnnnnnnnnnnnnnnnnnnnnnnnnnnnnnnnnnnnnnnnnnnnnnnnnnnnnnnnnnnnnnnnnnnnnnnnnnnnnnnnnnnnnnnnnnnnnnnnnnnnnnnnnnnnnnnnnnnnnnnnnnnnnnnnnnnnnnnnnnnnnnnnnnnnnnnnnnnnnnnnnnnnnnnnnnnnnnnnnnnnnnnnnnnnnnnnnnnnnnnnnnnnnnnnnnnnnnnnnnnnnnnnnnnnnnnnnnnnnnnnnnnnnnnnnnnnnnnnnnnnnnnnnnnnnnnnnnnnnnnnnnnnnnnnnnnnnnnnnnnnnnnnnnnnnnnnnnnnnnnnnnnnnnnnnnnnnnnnnnnnnnnnnnnnnnnnnnnnnnnnnnnnnnnnnnnnnnnnnnnnnnnnnnnnnnnnnnnnnnnnnnnnnnnnnnnnnnnnnnnnnnnnnnnnnnnnnnnnnnnnnnnnnnnnnnnnnnnnnnnnnnnnnnnnnnnnnnnnnnnnnnnnnnnnnnnnnnnnnnnnnnnnnnnnnnnnnnnnnnnnnnnnnnnnnnnnnnnnnnnnnnnnnnnnnnnnnnnnnnnnnnnnnnnnnnnnnnnnnnnnnnnnnnnnnnnnnnnnnnnnnnnnnnnnnnnnnnnnnnnnnnnnnnnnnnnnnnnnnnnnnnnnnnnnnnnnnnnnnnnnnnnnnnnnnnnnnnnnnnnnnnnnnnnnnnnnnnnnnnnnnnnnnnnnnnnnnnnnnnnnnnnnnnnnnnnnnnnnnnnnnnnnnnnnnnnnnnnnnnnnnnnnnnnnnnnnnnnnnnnnnnnnnnnnnnnnnnnnnnnnnnnnnnnnnnnnnnnnnnnnnnnnnnnnnnnnnnnnnnnnnnnnnnnnnnnnnnnnnnnnnnnnnnnnnnnnnnnnnnnnnnnnnnnnnnnnnnnnnnnnnnnnnnnnnnnnnnnnnnnnnnnnnnnnnnnnnnnnnnnnnnnnnnnnnnnnnnnnnnnnnnnnnnnnnnnnnnnnnnnnnnnnnnnnnnnnnnnnnnnnnnnnnnnnnnnnnnnnnnnnnnnnnnnnnnnnnnnnnnnnnnnnnnnnnnnnnnnnnnnnnnnnnnnnnnnnnnnnnnnnnnnnnnnnnnnnnnnnnnnnnnnnnnnnnnnnnnnnnnnnnnnnnnnnnnnnnnnnnnnnnnnnnnnnnnnnnnnnnnnnnnnnnnnnnnnnnnnnnnnnnnnnnnnnnnnnnnnnnnnnnnnnnnnnnnnnnnnnnnnnnnnnnnnnnnnnnnnnnnnnnnnnnnnnnnnnnnnnnnnnnnnnnnnnnnnnnnnnnnnnnnnnnnnnnnnnnnnnnnnnnnnnnnnnnnnnnnnnnnnnnnnnnnnnnnnnnnnnnnnnnnnnnnnnnnnnnnnnnnnnnnnnnnnnnnnnnnnnnnnnnnnnnnnnnnnnnnnnnnnnnnnnnnnnnnnnnnnnnnnnnnnnnnnnnnnnnnnnnnnnnnnnnnnnnnnnnnnnnnnnnnnnnnnnnnnnnnnnnnnnnnnnnnnnnnnnnnnnnnnnnnnnnnnnnnnnnnnnnnnnnnnnnnnnnnnnnnnnnnnnnnnnnnnnnnnnnnnnnnnnnnnnnnnnnnnnnnnnnnnnnnnnnnnnnnnnnnnnnnnnnnnnnnnnnnnnnnnnnnnnnnnnnnnnnnnnnnnnnnnnnnnnnnnnnnnnnnnnnnnnnnnnnnnnnnnnnnnnnnnnnnnnnnnnnnnnnnnnnnnnnnnnnnnnnnnnnnnnnnnnnnnnnnnnnnnnnnnnnnnnnnnnnnnnnnnnnnnnnnnnnnnnnnnnnnnnnnnnnnnnnnnnnnnnnnnnnnnnnnnnnnnnnnnnnnnnnnnnnnnnnnnnnnnnnnnnnnnnnnnnnnnnnnnnnnnnnnnnnnnnnnnnnnnnnnnnnnnnnnnnnnnnnnnnnnnnnnnnnnnnnnnnnnnnnnnnnnnnnnnnnnnnnnnnnnnnnnnnnnnnnnnnnnnnnnnnnnnnnnnnnnnnnnnnnnnnnnnnnnnnnnnnnnnnnnnnnnnnnnnnnnnnnnnnnnnnnnnnnnnnnnnnnnnnnnnnnnnnnnnnnnnnnnnnnnnnnnnnnnnnnnnnnnnnnnnnnnnnnnnnnnnnnnnnnnnnnnnnnnnnnnnnnnnnnnnnnnnnnnnnnnnnnnnnnnnnnnnnnnnnnnnnnnnnnnnnnnnnnnnnnnnnnnnnnnnnnnnnnnnnnnnnnnnnnnnnnnnnnnnnnnnnnnnnnnnnnnnnnnnnnnnnnnnnnnnnnnnnnnnnnnnnnnnnnnnnnnnnnnnnnnnnnnnnnnnnnnnnnnnnnnnnnnnnnnnnnnnnnnnnnnnnnnnnnnnnnnnnnnnnnnnnnnnnnnnnnnnnnnnnnnnnnnnnnnnnnnnnnnnnnnnnnnnnnnnnnnnnnnnnnnnnnnnnnnnnnnnnnnnnnnnnnnnnnnnnnnnnnnnnnnnnnnnnnnnnnnnnnnnnnnnnnnnnnnnnnnnnnnnnnnnnnnnnnnnnnnnnnnnnnnnnnnnnnnnnnnnnnnnnnnnnnnnnnnnnnnnnnnnnnnnnnnnnnnnnnnnnnnnnnnnnnnnnnnnnnnnnnnnnnnnnnnnnnnnnnnnnnnnnnnnnnnnnnnnnnnnnnnnnnnnnnnnnnnnnnnnnnnnnnnnnnnnnnnnnnnnnnnnnnnnnnnnnnnnnnnnnnnnnnnnnnnnnnnnnnnnnnnnnnnnnnnnnnnnnnnnnnnnnnnnnnnnnnnnnnnnnnnnnnnnnnnnnnnnnnnnnnnnnnnnnnnnnnnnnnnnnnnnnnnnnnnnnnnnnnnnnnnnnnnnnnnnnnnnnnnnnnnnnnnnnnnnnnnnnnnnnnnnnnnnnnnnnnnnnnnnnnnnnnnnnnnnnnnnnnnnnnnnnnnnnnnnnnnnnnnnnnnnnnnnnnnnnnnnnnnnnnnnnnnnnnnnnnnnnnnnnnnnnnnnnnnnnnnnnnnnnnnnnnnnnnnnnnnnnnnnnnnnnnnnnnnnnnnnnnnnnnnnnnnnnnnnnnnnnnnnnnnnnnnnnnnnnnnnnnnnnnnnnnnnnnnnnnnnnnnnnnnnnnnnnnnnnnnnnnnnnnnnnnnnnnnnnnnnnnnnnnnnnnnnnnnnnnnnnnnnnnnnnnnnnnnnnnnnnnnnnnnnnnnnnnnnnnnnnnnnnnnnnnnnnnnnnnnnnnnnnnnnnnnnnnnnnnnnnnnnnnnnnnnnnnnnnnnnnnnnnnnnnnnnnnnnnnnnnnnnnnnnnnnnnnnnnnnnnnnnnnnnnnnnnnnnnnnnnnnnnnnnnnnnnnnnnnnnnnnnnnnnnnnnnnnnnnnnnnnnnnnnnnnnnnnnnnnnnnnnnnnnnnnnnnnnnnnnnnnnnnnnnnnnnnnnnnnnnnnnnnnnnnnnnnnnnnnnnnnnnnnnnnnnnnnnnnnnnnnnnnnnnnnnnnnnnnnnnnnnnnnnnnnnnnnnnnnnnnnnnnnnnnnnnnnnnnnnnnnnnnnnnnnnnnnnnnnnnnnnnnnnnnnnnnnnnnnnnnnnnnnnnnnnnnnnnnnnnnnnnnnnnnnnnnnnnnnnnnnnnnnnnnnnnnnnnnnnnnnnnnnnnnnnnnnnnnnnnnnnnnnnnnnnnnnnnnnnnnnnnnnnnnnnnnnnnnnnnnnnnnnnnnnnnnnnnnnnnnnnnnnnnnnnnnnnnnnnnnnnnnnnnnnnnnnnnnnnnnnnnnnnnnnnnnnnnnnnnnnnnnnnnnnnnnnnnnnnnnnnnnnnnnnnnnnnnnnnnnnnnnnnnnnnnnnnnnnnnnnnnnnnnnnnnnnnnnnnnnnnnnnnnnnnnnnnnnnnnnnnnnnnnnnnnnnnnnnnnnnnnnnnnnnnnnnnnnnnnnnnnnnnnnnnnnnnnnnnnnnnnnnnnnnnnnnnnnnnnnnnnnnnnnnnnnnnnnnnnnnnnnnnnnnnnnnnnnnnnnnnnnnnnnnnnnnnnnnnnnnnnnnnnnnnnnnnnnnnnnnnnnnnnnnnnnnnnnnnnnnnnnnnnnnnnnnnnnnnnnnnnnnnnnnnnnnnnnnnnnnnnnnnnnnnnnnnnnnnnnnnnnnnnnnnnnnnnnnnnnnnnnnnnnnnnnnnnnnnnnnnnnnnnnnnnnnnnnnnnnnnnnnnnnnnnnnnnnnnnnnnnnnnnnnnnnnnnnnnnnnnnnnnnnnnnnnnnnnnnnnnnnnnnnnnnnnnnnnnnnnnnnnnnnnnnnnnnnnnnnnnnnnnnnnnnnnnnnnnnnnnnnnnnnnnnnnnnnnnnnnnnnnnnnnnnnnnnnnnnnnnnnnnnnnnnnnnnnnnnnnnnnnnnnnnnnnnnnnnnnnnnnnnnnnnnnnnnnnnnnnnnnnnnnnnnnnnnnnnnnnnnnnnnnnnnnnnnnnnnnnnnnnnnnnnnnnnnnnnnnnnnnnnnnnnnnnnnnnnnnnnnnnnnnnnnnnnnnnnnnnnnnnnnnnnnnnnnnnnnnnnnnnnnnnnnnnnnnnnnnnnnnnnnnnnnnnnnnnnnnnnnnnnnnnnnnnnnnnnnnnnnnnnnnnnnnnnnnnnnnnnnnnnnnnnnnnnnnnnnnnnnnnnnnnnnnnnnnnnnnnnnnnnnnnnnnnnnnnnnnnnnnnnnnnnnnnnnnnnnnnnnnnnnnnnnnnnnnnnnnnnnnnnnnnnnnnnnnnnnnnnnnnnnnnnnnnnnnnnnnnnnnnnnnnnnnnnnnnnnnnnnnnnnnnnnnnnnnnnnnnnnnnnnnnnnnnnnnnnnnnnnnnnnnnnnnnnnnnnnnnnnnnnnnnnnnnnnnnnnnnnnnnnnnnnnnnnnnnnnnnnnnnnnnnnnnnnnnnnnnnnnnnnnnnnnnnnnnnnnnnnnnnnnnnnnnnnnnnnnnnnnnnnnnnnnnnnnnnnnnnnnnnnnnnnnnnnnnnnnnnnnnnnnnnnnnnnnnnnnnnnnnnnnnnnnnnnnnnnnnnnnnnnnnnnnnnnnnnnnnnnnnnnnnnnnnnnnnnnnnnnnnnnnnnnnnnnnnnnnnnnnnnnnnnnnnnnnnnnnnnnnnnnnnnnnnnnnnnnnnnnnnnnnnnnnnnnnnnnnnnnnnnnnnnnnnnnnnnnnnnnnnnnnnnnnnnnnnnnnnnnnnnnnnnnnnnnnnnnnnnnnnnnnnnnnnnnnnnnnnnnnnnnnnnnnnnnnnnnnnnnnnnnnnnnnnnnnnnnnnnnnnnnnnnnnnnnnnnnnnnnnnnnnnnnnnnnnnnnnnnnnnnnnnnnnnnnnnnnnnnnnnnnnnnnnnnnnnnnnnnnnnnnnnnnnnnnnnnnnnnnnnnnnnnnnnnnnnnnnnnnnnnnnnnnnnnnnnnnnnnnnnnnnnnnnnnnnnnnnnnnnnnnnnnnnnnnnnnnnnnnnnnnnnnnnnnnnnnnnnnnnnnnnnnnnnnnnnnnnnnnnnnnnnnnnnnnnnnnnnnnnnnnnnnnnnnnnnnnnnnnnnnnnnnnnnnnnnnnnnnnnnnnnnnnnnnnnnnnnnnnnnnnnnnnnnnnnnnnnnnnnnnnnnnnnnnnnnnnnnnnnnnnnnnnnnnnnnnnnnnnnnnnnnnnnnnnnnnnnnnnnnnnnnnnnnnnnnnnnnnnnnnnnnnnnnnnnnnnnnnnnnnnnnnnnnnnnnnnnnnnnnnnnnnnnnnnnnnnnnnnnnnnnnnnnnnnnnnnnnnnnnnnnnnnnnnnnnnnnnnnnnnnnnnnnnnnnnnnnnnnnnnnnnnnnnnnnnnnnnnnnnnnnnnnnnnnnnnnnnnnnnnnnnnnnnnnnnnnnnnnnnnnnnnnnnnnnnnnnnnnnnnnnnnnnnnnnnnnnnnnnnnnnnnnnnnnnnnnnnnnnnnnnnnnnnnnnnnnnnnnnnnnnnnnnnnnnnnnnnnnnnnnnnnnnnnnnnnnnnnnnnnnnnnnnnnnnnnnnnnnnnnnnnnnnnnnnnnnnnnnnnnnnnnnnnnnnnnnnnnnnnnnnnnnnnnnnnnnnnnnnnnnnnnnnnnnnnnnnnnnnnnnnnnnnnnnnnnnnnnnnnnnnnnnnnnnnnnnnnnnnnnnnnnnnnnnnnnnnnnnnnnnnnnnnnnnnnnnnnnnnnnnnnnnnnnnnnnnnnnnnnnnnnnnnnnnnnnnnnnnnnnnnnnnnnnnnnnnnnnnnnnnnnnnnnnnnnnnnnnnnnnnnnnnnnnnnnnnnnnnnnnnnnnnnnnnnnnnnnnnnnnnnnnnnnnnnnnnnnnnnnnnnnnnnnnnnnnnnnnnnnnnnnnnnnnnnnnnnnnnnnnnnnnnnnnnnnnnnnnnnnnnnnnnnnnnnnnnnnnnnnnnnnnnnnnnnnnnnnnnnnnnnnnnnnnnnnnnnnnnnnnnnnnnnnnnnnnnnnnnnnnnnnnnnnnnnnnnnnnnnnnnnnnnnnnnnnnnnnnnnnnnnnnnnnnnnnnnnnnnnnnnnnnnnnnnnnnnnnnnnnnnnnnnnnnnnnnnnnnnnnnnnnnnnnnnnnnnnnnnnnnnnnnnnnnnnnnnnnnnnnnnnnnnnnnnnnnnnnnnnnnnnnnnnnnnnnnnnnnnnnnnnnnnnnnnnnnnnnnnnnnnnnnnnnnnnnnnnnnnnnnnnnnnnnnnnnnnnnnnnnnnnnnnnnnnnnnnnnnnnnnnnnnnnnnnnnnnnnnnnnnnnnnnnnnnnnnnnnnnnnnnnnnnnnnnnnnnnnnnnnnnnnnnnnnnnnnnnnnnnnnnnnnnnnnnnnnnnnnnnnnnnnnnnnnnnnnnnnnnnnnnnnnnnnnnnnnnnnnnnnnnnnnnnnnnnnnnnnnnnnnnnnnnnnnnnnnnnnnnnnnnnnnnnnnnnnnnnnnnnnnnnnnnnnnnnnnnnnnnnnnnnnnnnnnnnnnnnnnnnnnnnnnnnnnnnnnnnnnnnnnnnnnnnnnnnnnnnnnnnnnnnnnnnnnnnnnnnnnnnnnnnnnnnnnnnnnnnnnnnnnnnnnnnnnnnnnnnnnnnnnnnnnnnnnnnnnnnnnnnnnnnnnnnnnnnnnnnnnnnnnnnnnnnnnnnnnnnnnnnnnnnnnnnnnnnnnnnnnnnnnnnnnnnnnnnnnnnnnnnnnnnnnnnnnnnnnnnnnnnnnnnnnnnnnnnnnnnnnnnnnnnnnnnnnnnnnnnnnnnnnnnnnnnnnnnnnnnnnnnnnnnnnnnnnnnnnnnnnnnnnnnnnnnnnnnnnnnnnnnnnnnnnnnnnnnnnnnnnnnnnnnnnnnnnnnnnnnnnnnnnnnnnnnnnnnnnnnnnnnnnnnnnnnnnnnnnnnnnnnnnnnnnnnnnnnnnnnnnnnnnnnnnnnnnnnnnnnnnnnnnnnnnnnnnnnnnnnnnnnnnnnnnnnnnnnnnnnnnnnnnnnnnnnnnnnnnnnnnnnnnnnnnnnnnnnnnnnnnnnnnnnnnnnnnnnnnnnnnnnnnnnnnnnnnnnnnnnnnnnnnnnnnnnnnnnnnnnnnnnnnnnnnnnnnnnnnnnnnnnnnnnnnnnnnnnnnnnnnnnnnnnnnnnnnnnnnnnnnnnnnnnnnnnnnnnnnnnnnnnnnnnnnnnnnnnnnnnnnnnnnnnnnnnnnnnnnnnnnnnnnnnnnnnnnnnnnnnnnnnnnnnnnnnnnnnnnnnnnnnnnnnnnnnnnnnnnnnnnnnnnnnnnnnnnnnnnnnnnnnnnnnnnnnnnnnnnnnnnnnnnnnnnnnnnnnnnnnnnnnnnnnnnnnnnnnnnnnnnnnnnnnnnnnnnnnnnnnnnnnnnnnnnnnnnnnnnnnnnnnnnnnnnnnnnnnnnnnnnnnnnnnnnnnnnnnnnnnnnnnnnnnnnnnnnnnnnnnnnnnnnnnnnnnnnnnnnnnnnnnnnnnnnnnnnnnnnnnnnnnnnnnnnnnnnnnnnnnnnnnnnnnnnnnnnnnnnnnnnnnnnnnnnnnnnnnnnnnnnnnnnnnnnnnnnnnnnnnnnnnnnnnnnnnnnnnnnnnnnnnnnnnnnnnnnnnnnnnnnnnnnnnnnnnnnnnnnnnnnnnnnnnnnnnnnnnnnnnnnnnnnnnnnnnnnnnnnnnnnnnnnnnnnnnnnnnnnnnnnnnnnnnnnnnnnnnnnnnnnnnnnnnnnnnnnnnnnnnnnnnnnnnnnnnnnnnnnnnnnnnnnnnnnnnnnnnnnnnnnnnnnnnnnnnnnnnnnnnnnnnnnnnnnnnnnnnnnnnnnnnnnnnnnnnnnnnnnnnnnnnnnnnnnnnnnnnnnnnnnnnnnnnnnnnnnnnnnnnnnnnnnnnnnnnnnnnnnnnnnnnnnnnnnnnnnnnnnnnnnnnnnnnnnnnnnnnnnnnnnnnnnnnnnnnnnnnnnnnnnnnnnnnnnnnnnnnnnnnnnnnnnnnnnnnnnnnnnnnnnnnnnnnnnnnnnnnnnnnnnnnnnnnnnnnnnnnnnnnnnnnnnnnnnnnnnnnnnnnnnnnnnnnnnnnnnnnnnnnnnnnnnnnnnnnnnnnnnnnnnnnnnnnnnnnnnnnnnnnnnnnnnnnnnnnnnnnnnnnnnnnnnnnnnnnnnnnnnnnnnnnnnnnnnnnnnnnnnnnnnnnnnnnnnnnnnnnnnnnnnnnnnnnnnnnnnnnnnnnnnnnnnnnnnnnnnnnnnnnnnnnnnnnnnnnnnnnnnnnnnnnnnnnnnnnnnnnnnnnnnnnnnnnnnnnnnnnnnnnnnnnnnnnnnnnnnnnnnnnnnnnnnnnnnnnnnnnnnnnnnnnnnnnnnnnnnnnnnnnnnnnnnnnnnnnnnnnnnnnnnnnnnnnnnnnnnnnnnnnnnnnnnnnnnnnnnnnnnnnnnnnnnnnnnnnnnnnnnnnnnnnnnnnnnnnnnnnnnnnnnnnnnnnnnnnnnnnnnnnnnnnnnnnnnnnnnnnnnnnnnnnnnnnnnnnnnnnnnnnnnnnnnnnnnnnnnnnnnnnnnnnnnnnnnnnnnnnnnnnnnnnnnnnnnnnnnnnnnnnnnnnnnnnnnnnnnnnnnnnnnnnnnnnnnnnnnnnnnnnnnnnnnnnnnnnnnnnnnnnnnnnnnnnnnnnnnnnnnnnnnnnnnnnnnnnnnnnnnnnnnnnnnnnnnnnnnnnnnnnnnnnnnnnnnnnnnnnnnnnnnnnnnnnnnnnnnnnnnnnnnnnnnnnnnnnnnnnnnnnnnnnnnnnnnnnnnnnnnnnnnnnnnnnnnnnnnnnnnnnnnnnnnnnnnnnnnnnnnnnnnnnnnnnnnnnnnnnnnnnnnnnnnnnnnnnnnnnnnnnnnnnnnnnnnnnnnnnnnnnnnnnnnnnnnnnnnnnnnnnnnnnnnnnnnnnnnnnnnnnnnnnnnnnnnnnnnnnnnnnnnnnnnnnnnnnnnnnnnnnnnnnnnnnnnnnnnnnnnnnnnnnnnnnnnnnnnnnnnnnnnnnnnnnnnnnnnnnnnnnnnnnnnnnnnnnnnnnnnnnnnnnnnnnnnnnnnnnnnnnnnnnnnnnnnnnnnnnnnnnnnnnnnnnnnnnnnnnnnnnnnnnnnnnnnnnnnnnnnnnnnnnnnnnnnnnnnnnnnnnnnnnnnnnnnnnnnnnnnnnnnnnnnnnnnnnnnnnnnnnnnnnnnnnnnnnnnnnnnnnnnnnnnnnnnnnnnnnnnnnnnnnnnnnnnnnnnnnnnnnnnnnnnnnnnnnnnnnnnnnnnnnnnnnnnnnnnnnnnnnnnnnnnnnnnnnnnnnnnnnnnnnnnnnnnnnnnnnnnnnnnnnnnnnnnnnnnnnnnnnnnnnnnnnnnnnnnnnnnnnnnnnnnnnnnnnnnnnnnnnnnnnnnnnnnnnnnnnnnnnnnnnnnnnnnnnnnnnnnnnnnnnnnnnnnnnnnnnnnnnnnnnnnnnnnnnnnnnnnnnnnnnnnnnnnnnnnnnnnnnnnnnnnnnnnnnnnnnnnnnnnnnnnnnnnnnnnnnnnnnnnnnnnnnnnnnnnnnnnnnnnnnnnnnnnnnnnnnnnnnnnnnnnnnnnnnnnnnnnnnnnnnnnnnnnnnnnnnnnnnnnnnnnnnnnnnnnnnnnnnnnnnnnnnnnnnnnnnnnnnnnnnnnnnnnnnnnnnnnnnnnnnnnnnnnnnnnnnnnnnnnnnnnnnnnnnnnnnnnnnnnnnnnnnnnnnnnnnnnnnnnnnnnnnnnnnnnnnnnnnnnnnnnnnnnnnnnnnnnnnnnnnnnnnnnnnnnnnnnnnnnnnnnnnnnnnnnnnnnnnnnnnnnnnnnnnnnnnnnnnnnnnnnnnnnnnnnnnnnnnnnnnnnnnnnnnnnnnnnnnnnnnnnnnnnnnnnnnnnnnnnnnnnnnnnnnnnnnnnnnnnnnnnnnnnnnnnnnnnnnnnnnnnnnnnnnnnnnnnnnnnnnnnnnnnnnnnnnnnnnnnnnnnnnnnnnnnnnnnnnnnnnnnnnnnnnnnnnnnnnnnnnnnnnnnnnnnnnnnnnnnnnnnnnnnnnnnnnnnnnnnnnnnnnnnnnnnnnnnnnnnnnnnnnnnnnnnnnnnnnnnnnnnnnnnnnnnnnnnnnnnnnnnnnnnnnnnnnnnnnnnnnnnnnnnnnnnnnnnnnnnnnnnnnnnnnnnnnnnnnnnnnnnnnnnnnnnnnnnnnnnnnnnnnnnnnnnnnnnnnnnnnnnnnnnnnnnnnnnnnnnnnnnnnnnnnnnnnnnnnnnnnnnnnnnnnnnnnnnnnnnnnnnnnnnnnnnnnnnnnnnnnnnnnnnnnnnnnnnnnnnnnnnnnnnnnnnnnnnnnnnnnnnnnnnnnnnnnnnnnnnnnnnnnnnnnnnnnnnnnnnnnnnnnnnnnnnnnnnnnnnnnnnnnnnnnnnnnnnnnnnnnnnnnnnnnnnnnnnnnnnnnnnnnnnnnnnnnnnnnnnnnnnnnnnnnnnnnnnnnnnnnnnnnnnnnnnnnnnnnnnnnnnnnnnnnnnnnnnnnnnnnnnnnnnnnnnnnnnnnnnnnnnnnnnnnnnnnnnnnnnnnnnnnnnnnnnnnnnnnnnnnnnnnnnnnnnnnnnnnnnnnnnnnnnnnnnnnnnnnnnnnnnnnnnnnnnnnnnnnnnnnnnnnnnnnnnnnnnnnnnnnnnnnnnnnnnnnnnnnnnnnnnnnnnnnnnnnnnnnnnnnnnnnnnnnnnnnnnnnnnnnnnnnnnnnnnnnnnnnnnnnnnnnnnnnnnnnnnnnnnnnnnnnnnnnnnnnnnnnnnnnnnnnnnnnnnnnnnnnnnnnnnnnnnnnnnnnnnnnnnnnnnnnnnnnnnnnnnnnnnnnnnnnnnnnnnnnnnnnnnnnnnnnnnnnnnnnnnnnnnnnnnnnnnnnnnnnnnnnnnnnnnnnnnnnnnnnnnnnnnnnnnnnnnnnnnnnnnnnnnnnnnnnnnnnnnnnnnnnnnnnnnnnnnnnnnnnnnnnnnnnnnnnnnnnnnnnnnnnnnnnnnnnnnnnnnnnnnnnnnnnnnnnnnnnnnnnnnnnnnnnnnnnnnnnnnnnnnnnnnnnnnnnnnnnnnnnnnnnnnnnnnnnnnnnnnnnnnnnnnnnnnnnnnnnnnnnnnnnnnnnnnnnnnnnnnnnnnnnnnnnnnnnnnnnnnnnnnnnnnnnnnnnnnnnnnnnnnnnnnnnnnnnnnnnnnnnnnnnnnnnnnnnnnnnnnnnnnnnnnnnnnnnnnnnnnnnnnnnnnnnnnnnnnnnnnnnnnnnnnnnnnnnnnnnnnnnnnnnnnnnnnnnnnnnnnnnnnnnnnnnnnnnnnnnnnnnnnnnnnnnnnnnnnnnnnnnnnnnnnnnnnnnnnnnnnnnnnnnnnnnnnnnnnnnnnnnnnnnnnnnnnnnnnnnnnnnnnnnnnnnnnnnnnnnnnnnnnnnnnnnnnnnnnnnnnnnnnnnnnnnnnnnnnnnnnnnnnnnnnnnnnnnnnnnnnnnnnnnnnnnnnnnnnnnnnnnnnnnnnnnnnnnnnnnnnnnnnnnnnnnnnnnnnnnnnnnnnnnnnnnnnnnnnnnnnnnnnnnnnnnnnnnnnnnnnnnnnnnnnnnnnnnnnnnnnnnnnnnnnnnnnnnnnnnnnnnnnnnnnnnnnnnnnnnnnnnnnnnnnnnnnnnnnnnnnnnnnnnnnnnnnnnnnnnnnnnnnnnnnnnnnnnnnnnnnnnnnnnnnnnnnnnnnnnnnnnnnnnnnnnnnnnnnnnnnnnnnnnnnnnnnnnnnnnnnnnnnnnnnnnnnnnnnnnnnnnnnnnnnnnnnnnnnnnnnnnnnnnnnnnnnnnnnnnnnnnnnnnnnnnnnnnnnnnnnnnnnnnnnnnnnnnnnnnnnnnnnnnnnnnnnnnnnnnnnnnnnnnnnnnnnnnnnnnnnnnnnnnnnnnnnnnnnnnnnnnnnnnnnnnnnnnnnnnnnnnnnnnnnnnnnnnnnnnnnnnnnnnnnnnnnnnnnnnnnnnnnnnnnnnnnnnnnnnnnnnnnnnnnnnnnnnnnnnnnnnnnnnnnnnnnnnnnnnnnnnnnnnnnnnnnnnnnnnnnnnnnnnnnnnnnnnnnnnnnnnnnnnnnnnnnnnnnnnnnnnnnnnnnnnnnnnnnnnnnnnnnnnnnnnnnnnnnnnnnnnnnnnnnnnnnnnnnnnnnnnnnnnnnnnnnnnnnnnnnnnnnnnnnnnnnnnnnnnnnnnnnnnnnnnnnnnnnnnnnnnnnnnnnnnnnnnnnnnnnnnnnnnnnnnnnnnnnnnnnnnnnnnnnnnnnnnnnnnnnnnnnnnnnnnnnnnnnnnnnnnnnnnnnnnnnnnnnnnnnnnnnnnnnnnnnnnnnnnnnnnnnnnnnnnnnnnnnnnnnnnnnnnnnnnnnnnnnnnnnnnnnnnnnnnnnnnnnnnnnnnnnnnnnnnnnnnnnnnnnnnnnnnnnnnnnnnnnnnnnnnnnnnnnnnnnnnnnnnnnnnnnnnnnnnnnnnnnnnnnnnnnnnnnnnnnnnnnnnnnnnnnnnnnnnnnnnnnnnnnnnnnnnnnnnnnnnnnnnnnnnnnnnnnnnnnnnnnnnnnnnnnnnnnnnnnnnnnnnnnnnnnnnnnnnnnnnnnnnnnnnnnnnnnnnnnnnnnnnnnnnnnnnnnnnnnnnnnnnnnnnnnnnnnnnnnnnnnnnnnnnnnnnnnnnnnnnnnnnnnnnnnnnnnnnnnnnnnnnnnnnnnnnnnnnnnnnnnnnnnnnnnnnnnnnnnnnnnnnnnnnnnnnnnnnnnnnnnnnnnnnnnnnnnnnnnnnnnnnnnnnnnnnnnnnnnnnnnnnnnnnnnnnnnnnnnnnnnnnnnnnnnnnnnnnnnnnnnnnnnnnnnnnnnnnnnnnnnnnnnnnnnnnnnnnnnnnnnnnnnnnnnnnnnnnnnnnnnnnnnnnnnnnnnnnnnnnnnnnnnnnnnnnnnnnnnnnnnnnnnnnnnnnnnnnnnnnnnnnnnnnnnnnnnnnnnnnnnnnnnnnnnnnnnnnnnnnnnnnnnnnnnnnnnnnnnnnnnnnnnnnnnnnnnnnnnnnnnnnnnnnnnnnnnnnnnnnnnnnnnnnnnnnnnnnnnnnnnnnnnnnnnnnnnnnnnnnnnnnnnnnnnnnnnnnnnnnnnnnnnnnnnnnnnnnnnnnnnnnnnnnnnnnnnnnnnnnnnnnnnnnnnnnnnnnnnnnnnnnnnnnnnnnnnnnnnnnnnnnnnnnnnnnnnnnnnnnnnnnnnnnnnnnnnnnnnnnnnnnnnnnnnnnnnnnnnnnnnnnnnnnnnnnnnnnnnnnnnnnnnnnnnnnnnnnnnnnnnnnnnnnnnnnnnnnnnnnnnnnnnnnnnnnnnnnnnnnnnnnnnnnnnnnnnnnnnnnnnnnnnnnnnnnnnnnnnnnnnnnnnnnnnnnnnnnnnnnnnnnnnnnnnnnnnnnnnnnnnnnnnnnnnnnnnnnnnnnnnnnnnnnnnnnnnnnnnnnnnnnnnnnnnnnnnnnnnnnnnnnnnnnnnnnnnnnnnnnnnnnnnnnnnnnnnnnnnnnnnnnnnnnnnnnnnnnnnnnnnnnnnnnnnnnnnnnnnnnnnnnnnnnnnnnnnnnnnnnnnnnnnnnnnnnnnnnnnnnnnnnnnnnnnnnnnnnnnnnnnnnnnnnnnnnnnnnnnnnnnnnnnnnnnnnnnnnnnnnnnnnnnnnnnnnnnnnnnnnnnnnnnnnnnnnnnnnnnnnnnnnnnnnnnnnnnnnnnnnnnnnnnnnnnnnnnnnnnnnnnnnnnnnnnnnnnnnnnnnnnnnnnnnnnnnnnnnnnnnnnnnnnnnnnnnnnnnnnnnnnnnnnnnnnnnnnnnnnnnnnnnnnnnnnnnnnnnnnnnnnnnnnnnnnnnnnnnnnnnnnnnnnnnnnnnnnnnnnnnnnnnnnnnnnnnnnnnnnnnnnnnnnnnnnnnnnnnnnnnnnnnnnnnnnnnnnnnnnnnnnnnnnnnnnnnnnnnnnnnnnnnnnnnnnnnnnnnnnnnnnnnnnnnnnnnnnnnnnnnnnnnnnnnnnnnnnnnnnnnnnnnnnnnnnnnnnnnnnnnnnnnnnnnnnnnnnnnnnnnnnnnnnnnnnnnnnnnnnnnnnnnnnnnnnnnnnnnnnnnnnnnnnnnnnnnnnnnnnnnnnnnnnnnnnnnnnnnnnnnnnnnnnnnnnnnnnnnnnnnnnnnnnnnnnnnnnnnnnnnnnnnnnnnnnnnnnnnnnnnnnnnnnnnnnnnnnnnnnnnnnnnnnnnnnnnnnnnnnnnnnnnnnnnnnnnnnnnnnnnnnnnnnnnnnnnnnnnnnnnnnnnnnnnnnnnnnnnnnnnnnnnnnnnnnnnnnnnnnnnnnnnnnnnnnnnnnnnnnnnnnnnnnnnnnnnnnnnnnnnnnnnnnnnnnnnnnnnnnnnnnnnnnnnnnnnnnnnnnnnnnnnnnnnnnnnnnnnnnnnnnnnnnnnnnnnnnnnnnnnnnnnnnnnnnnnnnnnnnnnnnnnnnnnnnnnnnnnnnnnnnnnnnnnnnnnnnnnnnnnnnnnnnnnnnnnnnnnnnnnnnnnnnnnnnnnnnnnnnnnnnnnnnnnnnnnnnnnnnnnnnnnnnnnnnnnnnnnnnnnnnnnnnnnnnnnnnnnnnnnnnnnnnnnnnnnnnnnnnnnnnnnnnnnnnnnnnnnnnnnnnnnnnnnnnnnnnnnnnnnnnnnnnnnnnnnnnnnnnnnnnnnnnnnnnnnnnnnnnnnnnnnnnnnnnnnnnnnnnnnnnnnnnnnnnnnnnnnnnnnnnnnnnnnnnnnnnnnnnnnnnnnnnnnnnnnnnnnnnnnnnnnnnnnnnnnnnnnnnnnnnnnnnnnnnnnnnnnnnnnnnnnnnnnnnnnnnnnnnnnnnnnnnnnnnnnnnnnnnnnnnnnnnnnnnnnnnnnnnnnnnnnnnnnnnnnnnnnnnnnnnnnnnnnnnnnnnnnnnnnnnnnnnnnnnnnnnnnnnnnnnnnnnnnnnnnnnnnnnnnnnnnnnnnnnnnnnnnnnnnnnnnnnnnnnnnnnnnnnnnnnnnnnnnnnnnnnnnnnnnnnnnnnnnnnnnnnnnnnnnnnnnnnnnnnnnnnnnnnnnnnnnnnnnnnnnnnnnnnnnnnnnnnnnnnnnnnnnnnnnnnnnnnnnnnnnnnnnnnnnnnnnnnnnnnnnnnnnnnnnnnnnnnnnnnnnnnnnnnnnnnnnnnnnnnnnnnnnnnnnnnnnnnnnnnnnnnnnnnnnnnnnnnnnnnnnnnnnnnnnnnnnnnnnnnnnnnnnnnnnnnnnnnnnnnnnnnnnnnnnnnnnnnnnnnnnnnnnnnnnnnnnnnnnnnnnnnnnnnnnnnnnnnnnnnnnnnnnnnnnnnnnnnnnnnnnnnnnnnnnnnnnnnnnnnnnnnnnnnnnnnnnnnnnnnnnnnnnnnnnnnnnnnnnnnnnnnnnnnnnnnnnnnnnnnnnnnnnnnnnnnnnnnnnnnnnnnnnnnnnnnnnnnnnnnnnnnnnnnnnnnnnnnnnnnnnnnnnnnnnnnnnnnnnnnnnnnnnnnnnnnnnnnnnnnnnnnnnnnnnnnnnnnnnnnnnnnnnnnnnnnnnnnnnnnnnnnnnnnnnnnnnnnnnnnnnnnnnnnnnnnnnnnnnnnnnnnnnnnnnnnnnnnnnnnnnnnnnnnnnnnnnnnnnnnnnnnnnnnnnnnnnnnnnnnnnnnnnnnnnnnnnnnnnnnnnnnnnnnnnnnnnnnnnnnnnnnnnnnnnnnnnnnnnnnnnnnnnnnnnnnnnnnnnnnnnnnnnnnnnnnnnnnnnnnnnnnnnnnnnnnnnnnnnnnnnnnnnnnnnnnnnnnnnnnnnnnnnnnnnnnnnnnnnnnnnnnnnnnnnnnnnnnnnnnnnnnnnnnnnnnnnnnnnnnnnnnnnnnnnnnnnnnnnnnnnnnnnnnnnnnnnnnnnnnnnnnnnnnnnnnnnnnnnnnnnnnnnnnnnnnnnnnnnnnnnnnnnnnnnnnnnnnnnnnnnnnnnnnnnnnnnnnnnnnnnnnnnnnnnnnnnnnnnnnnnnnnnnnnnnnnnnnnnnnnnnnnnnnnnnnnnnnnnnnnnnnnnnnnnnnnnnnnnnnnnnnnnnnnnnnnnnnnnnnnnnnnnnnnnnnnnnnnnnnnnnnnnnnnnnnnnnnnnnnnnnnnnnnnnnnnnnnnnnnnnnnnnnnnnnnnnnnnnnnnnnnnnnnnnnnnnnnnnnnnnnnnnnnnnnnnnnnnnnnnnnnnnnnnnnnnnnnnnnnnnnnnnnnnnnnnnnnnnnnnnnnnnnnnnnnnnnnnnnnnnnnnnnnnnnnnnnnnnnnnnnnnnnnnnnnnnnnnnnnnnnnnnnnnnnnnnnnnnnnnnnnnnnnnnnnnnnnnnnnnnnnnnnnnnnnnnnnnnnnnnnnnnnnnnnnnnnnnnnnnnnnnnnnnnnnnnnnnnnnnnnnnnnnnnnnnnnnnnnnnnnnnnnnnnnnnnnnnnnnnnnnnnnnnnnnnnnnnnnnnnnnnnnnnnnnnnnnnnnnnnnnnnnnnnnnnnnnnnnnnnnnnnnnnnnnnnnnnnnnnnnnnnnnnnnnnnnnnnnnnnnnnnnnnnnnnnnnnnnnnnnnnnnnnnnnnnnnnnnnnnnnnnnnnnnnnnnnnnnnnnnnnnnnnnnnnnnnnnnnnnnnnnnnnnnnnnnnnnnnnnnnnnnnnnnnnnnnnnnnnnnnnnnnnnnnnnnnnnnnnnnnnnnnnnnnnnnnnnnnnnnnnnnnnnnnnnnnnnnnnnnnnnnnnnnnnnnnnnnnnnnnnnnnnnnnnnnnnnnnnnnnnnnnnnnnnnnnnnnnnnnnnnnnnnnnnnnnnnnnnnnnnnnnnnnnnnnnnnnnnnnnnnnnnnnnnnnnnnnnnnnnnnnnnnnnnnnnnnnnnnnnnnnnnnnnnnnnnnnnnnnnnnnnnnnnnnnnnnnnnnnnnnnnnnnnnnnnnnnnnnnnnnnnnnnnnnnnnnnnnnnnnnnnnnnnnnnnnnnnnnnnnnnnnnnnnnnnnnnnnnnnnnnnnnnnnnnnnnnnnnnnnnnnnnnnnnnnnnnnnnnnnnnnnnnnnnnnnnnnnnnnnnnnnnnnnnnnnnnnnnnnnnnnnnnnnnnnnnnnnnnnnnnnnnnnnnnnnnnnnnnnnnnnnnnnnnnnnnnnnnnnnnnnnnnnnnnnnnnnnnnnnnnnnnnnnnnnnnnnnnnnnnnnnnnnnnnnnnnnnnnnnnnnnnnnnnnnnnnnnnnnnnnnnnnnnnnnnnnnnnnnnnnnnnnnnnnnnnnnnnnnnnnnnnnnnnnnnnnnnnnnnnnnnnnnnnnnnnnnnnnnnnnnnnnnnnnnnnnnnnnnnnnnnnnnnnnnnnnnnnnnnnnnnnnnnnnnnnnnnnnnnnnnnnnnnnnnnnnnnnnnnnnnnnnnnnnnnnnnnnnnnnnnnnnnnnnnnnnnnnnnnnnnnnnnnnnnnnnnnnnnnnnnnnnnnnnnnnnnnnnnnnnnnnnnnnnnnnnnnnnnnnnnnnnnnnnnnnnnnnnnnnnnnnnnnnnnnnnnnnnnnnnnnnnnnnnnnnnnnnnnnnnnnnnnnnnnnnnnnnnnnnnnnnnnnnnnnnnnnnnnnnnnnnnnnnnnnnnnnnnnnnnnnnnnnnnnnnnnnnnnnnnnnnnnnnnnnnnnnnnnnnnnnnnnnnnnnnnnnnnnnnnnnnnnnnnnnnnnnnnnnnnnnnnnnnnnnnnnnnnnnnnnnnnnnnnnnnnnnnnnnnnnnnnnnnnnnnnnnnnnnnnnnnnnnnnnnnnnnnnnnnnnnnnnnnnnnnnnnnnnnnnnnnnnnnnnnnnnnnnnnnnnnnnnnnnnnnnnnnnnnnnnnnnnnnnnnnnnnnnnnnnnnnnnnnnnnnnnnnnnnnnnnnnnnnnnnnnnnnnnnnnnnnnnnnnnnnnnnnnnnnnnnnnnnnnnnnnnnnnnnnnnnnnnnnnnnnnnnnnnnnnnnnnnnnnnnnnnnnnnnnnnnnnnnnnnnnnnnnnnnnnnnnnnnnnnnnnnnnnnnnnnnnnnnnnnnnnnnnnnnnnnnnnnnnnnnnnnnnnnnnnnnnnnnnnnnnnnnnnnnnnnnnnnnnnnnnnnnnnnnnnnnnnnnnnnnnnnnnnnnnnnnnnnnnnnnnnnnnnnnnnnnnnnnnnnnnnnnnnnnnnnnnnnnnnnnnnnnnnnnnnnnnnnnnnnnnnnnnnnnnnnnnnnnnnnnnnnnnnnnnnnnnnnnnnnnnnnnnnnnnnnnnnnnnnnnnnnnnnnnnnnnnnnnnnnnnnnnnnnnnnnnnnnnnnnnnnnnnnnnnnnnnnnnnnnnnnnnnnnnnnnnnnnnnnnnnnnnnnnnnnnnnnnnnnnnnnnnnnnnnnnnnnnnnnnnnnnnnnnnnnnnnnnnnnnnnnnnnnnnnnnnnnnnnnnnnnnnnnnnnnnnnnnnnnnnnnnnnnnnnnnnnnnnnnnnnnnnnnnnnnnnnnnnnnnnnnnnnnnnnnnnnnnnnnnnnnnnnnnnnnnnnnnnnnnnnnnnnnnnnnnnnnnnnnnnnnnnnnnnnnnnnnnnnnnnnnnnnnnnnnnnnnnnnnnnnnnnnnnnnnnnnnnnnnnnnnnnnnnnnnnnnnnnnnnnnnnnnnnnnnnnnnnnnnnnnnnnnnnnnnnnnnnnnnnnnnnnnnnnnnnnnnnnnnnnnnnnnnnnnnnnnnnnnnnnnnnnnnnnnnnnnnnnnnnnnnnnnnnnnnnnnnnnnnnnnnnnnnnnnnnnnnnnnnnnnnnnnnnnnnnnnnnnnnnnnnnnnnnnnnnnnnnnnnnnnnnnnnnnnnnnnnnnnnnnnnnnnnnnnnnnnnnnnnnnnnnnnnnnnnnnnnnnnnnnnnnnnnnnnnnnnnnnnnnnnnnnnnnnnnnnnnnnnnnnnnnnnnnnnnnnnnnnnnnnnnnnnnnnnnnnnnnnnnnnnnnnnnnnnnnnnnnnnnnnnnnnnnnnnnnnnnnnnnnnnnnnnnnnnnnnnnnnnnnnnnnnnnnnnnnnnnnnnnnnnnnnnnnnnnnnnnnnnnnnnnnnnnnnnnnnnnnnnnnnnnnnnnnnnnnnnnnnnnnnnnnnnnnnnnnnnnnnnnnnnnnnnnnnnnnnnnnnnnnnnnnnnnnnnnnnnnnnnnnnnnnnnnnnnnnnnnnnnnnnnnnnnnnnnnnnnnnnnnnnnnnnnnnnnnnnnnnnnnnnnnnnnnnnnnnnnnnnnnnnnnnnnnnnnnnnnnnnnnnnnnnnnnnnnnnnnnnnnnnnnnnnnnnnnnnnnnnnnnnnnnnnnnnnnnnnnnnnnnnnnnnnnnnnnnnnnnnnnnnnnnnnnnnnnnnnnnnnnnnnnnnnnnnnnnnnnnnnnnnnnnnnnnnnnnnnnnnnnnnnnnnnnnnnnnnnnnnnnnnnnnnnnnnnnnnnnnnnnnnnnnnnnnnnnnnnnnnnnnnnnnnnnnnnnnnnnnnnnnnnnnnnnnnnnnnnnnnnnnnnnnnnnnnnnnnnnnnnnnnnnnnnnnnnnnnnnnnnnnnnnnnnnnnnnnnnnnnnnnnnnnnnnnnnnnnnnnnnnnnnnnnnnnnnnnnnnnnnnnnnnnnnnnnnnnnnnnnnnnnnnnnnnnnnnnnnnnnnnnnnnnnnnnnnnnnnnnnnnnnnnnnnnnnnnnnnnnnnnnnnnnnnnnnnnnnnnnnnnnnnnnnnnnnnnnnnnnnnnnnnnnnnnnnnnnnnnnnnnnnnnnnnnnnnnnnnnnnnnnnnnnnnnnnnnnnnnnnnnnnnnnnnnnnnnnnnnnnnnnnnnnnnnnnnnnnnnnnnnnnnnnnnnnnnnnnnnnnnnnnnnnnnnnnnnnnnnnnnnnnnnnnnnnnnnnnnnnnnnnnnnnnnnnnnnnnnnnnnnnnnnnnnnnnnnnnnnnnnnnnnnnnnnnnnnnnnnnnnnnnnnnnnnnnnnnnnnnnnnnnnnnnnnnnnnnnnnnnnnnnnnnnnnnnnnnnnnnnnnnnnnnnnnnnnnnnnnnnnnnnnnnnnnnnnnnnnnnnnnnnnnnnnnnnnnnnnnnnnnnnnnnnnnnnnnnnnnnnnnnnnnnnnnnnnnnnnnnnnnnnnnnnnnnnnnnnnnnnnnnnnnnnnnnnnnnnnnnnnnnnnnnnnnnnnnnnnnnnnnnnnnnnnnnnnnnnnnnnnnnnnnnnnnnnnnnnnnnnnnnnnnnnnnnnnnnnnnnnnnnnnnnnnnnnnnnnnnnnnnnnnnnnnnnnnnnnnnnnnnnnnnnnnnnnnnnnnnnnnnnnnnnnnnnnnnnnnnnnnnnnnnnnnnnnnnnnnnnnnnnnnnnnnnnnnnnnnnnnnnnnnnnnnnnnnnnnnnnnnnnnnnnnnnnnnnnnnnnnnnnnnnnnnnnnnnnnnnnnnnnnnnnnnnnnnnnnnnnnnnnnnnnnnnnnnnnnnnnnnnnnnnnnnnnnnnnnnnnnnnnnnnnnnnnnnnnnnnnnnnnnnnnnnnnnnnnnnnnnnnnnnnnnnnnnnnnnnnnnnnnnnnnnnnnnnnnnnnnnnnnnnnnnnnnnnnnnnnnnnnnnnnnnnnnnnnnnnnnnnnnnnnnnnnnnnnnnnnnnnnnnnnnnnnnnnnnnnnnnnnnnnnnnnnnnnnnnnnnnnnnnnnnnnnnnnnnnnnnnnnnnnnnnnnnnnnnnnnnnnnnnnnnnnnnnnnnnnnnnnnnnnnnnnnnnnnnnnnnnnnnnnnnnnnnnnnnnnnnnnnnnnnnnnnnnnnnnnnnnnnnnnnnnnnnnnnnnnnnnnnnnnnnnnnnnnnnnnnnnnnnnnnnnnnnnnnnnnnnnnnnnnnnnnnnnnnnnnnnnnnnnnnnnnnnnnnnnnnnnnnnnnnnnnnnnnnnnnnnnnnnnnnnnnnnnnnnnnnnnnnnnnnnnnnnnnnnnnnnnnnnnnnnnnnnnnnnnnnnnnnnnnnnnnnnnnnnnnnnnnnnnnnnnnnnnnnnnnnnnnnnnnnnnnnnnnnnnnnnnnnnnnnnnnnnnnnnnnnnnnnnnnnnnnnnnnnnnnnnnnnnnnnnnnnnnnnnnnnnnnnnnnnnnnnnnnnnnnnnnnnnnnnnnnnnnnnnnnnnnnnnnnnnnnnnnnnnnnnnnnnnnnnnnnnnnnnnnnnnnnnnnnnnnnnnnnnnnnnnnnnnnnnnnnnnnnnnnnnnnnnnnnnnnnnnnnnnnnnnnnnnnnnnnnnnnnnnnnnnnnnnnnnnnnnnnnnnnnnnnnnnnnnnnnnnnnnnnnnnnnnnnnnnnnnnnnnnnnnnnnnnnnnnnnnnnnnnnnnnnnnnnnnnnnnnnnnnnnnnnnnnnnnnnnnnnnnnnnnnnnnnnnnnnnnnnnnnnnnnnnnnnnnnnnnnnnnnnnnnnnnnnnnnnnnnnnnnnnnnnnnnnnnnnnnnnnnnnnnnnnnnnnnnnnnnnnnnnnnnnnnnnnnnnnnnnnnnnnnnnnnnnnnnnnnnnnnnnnnnnnnnnnnnnnnnnnnnnnnnnnnnnnnnnnnnnnnnnnnnnnnnnnnnnnnnnnnnnnnnnnnnnnnnnnnnnnnnnnnnnnnnnnnnnnnnnnnnnnnnnnnnnnnnnnnnnnnnnnnnnnnnnnnnnnnnnnnnnnnnnnnnnnnnnnnnnnnnnnnnnnnnnnnnnnnnnnnnnnnnnnnnnnnnnnnnnnnnnnnnnnnnnnnnnnnnnnnnnnnnnnnnnnnnnnnnnnnnnnnnnnnnnnnnnnnnnnnnnnnnnnnnnnnnnnnnnnnnnnnnnnnnnnnnnnnnnnnnnnnnnnnnnnnnnnnnnnnnnnnnnnnnnnnnnnnnnnnnnnnnnnnnnnnnnnnnnnnnnnnnnnnnnnnnnnnnnnnnnnnnnnnnnnnnnnnnnnnnnnnnnnnnnnnnnnnnnnnnnnnnnnnnnnnnnnnnnnnnnnnnnnnnnnnnnnnnnnnnnnnnnnnnnnnnnnnnnnnnnnnnnnnnnnnnnnnnnnnnnnnnnnnnnnnnnnnnnnnnnnnnnnnnnnnnnnnnnnnnnnnnnnnnnnnnnnnnnnnnnnnnnnnnnnnnnnnnnnnnnnnnnnnnnnnnnnnnnnnnnnnnnnnnnnnnnnnnnnnnnnnnnnnnnnnnnnnnnnnnnnnnnnnnnnnnnnnnnnnnnnnnnnnnnnnnnnnnnnnnnnnnnnnnnnnnnnnnnnnnnnnnnnnnnnnnnnnnnnnnnnnnnnnnnnnnnnnnnnnnnnnnnnnnnnnnnnnnnnnnnnnnnnnnnnnnnnnnnnnnnnnnnnnnnnnnnnnnnnnnnnnnnnnnnnnnnnnnnnnnnnnnnnnnnnnnnnnnnnnnnnnnnnnnnnnnnnnnnnnnnnnnnnnnnnnnnnnnnnnnnnnnnnnnnnnnnnnnnnnnnnnnnnnnnnnnnnnnnnnnnnnnnnnnnnnnnnnnnnnnnnnnnnnnnnnnnnnnnnnnnnnnnnnnnnnnnnnnnnnnnnnnnnnnnnnnnnnnnnnnnnnnnnnnnnnnnnnnnnnnnnnnnnnnnnnnnnnnnnnnnnnnnnnnnnnnnnnnnnnnnnnnnnnnnnnnnnnnnnnnnnnnnnnnnnnnnnnnnnnnnnnnnnnnnnnnnnnnnnnnnnnnnnnnnnnnnnnnnnnnnnnnnnnnnnnnnnnnnnnnnnnnnnnnnnnnnnnnnnnnnnnnnnnnnnnnnnnnnnnnnnnnnnnnnnnnnnnnnnnnnnnnnnnnnnnnnnnnnnnnnnnnnnnnnnnnnnnnnnnnnnnnnnnnnnnnnnnnnnnnnnnnnnnnnnnnnnnnnnnnnnnnnnnnnnnnnnnnnnnnnnnnnnnnnnnnnnnnnnnnnnnnnnnnnnnnnnnnnnnnnnnnnnnnnnnnnnnnnnnnnnnnnnnnnnnnnnnnnnnnnnnnnnnnnnnnnnnnnnnnnnnnnnnnnnnnnnnnnnnnnnnnnnnnnnnnnnnnnnnnnnnnnnnnnnnnnnnnnnnnnnnnnnnnnnnnnnnnnnnnnnnnnnnnnnnnnnnnnnnnnnnnnnnnnnnnnnnnnnnnnnnnnnnnnnnnnnnnnnnnnnnnnnnnnnnnnnnnnnnnnnnnnnnnnnnnnnnnnnnnnnnnnnnnnnnnnnnnnnnnnnnnnnnnnnnnnnnnnnnnnnnnnnnnnnnnnnnnnnnnnnnnnnnnnnnnnnnnnnnnnnnnnnnnnnnnnnnnnnnnnnnnnnnnnnnnnnnnnnnnnnnnnnnnnnnnnnnnnnnnnnnnnnnnnnnnnnnnnnnnnnnnnnnnnnnnnnnnnnnnnnnnnnnnnnnnnnnnnnnnnnnnnnnnnnnnnnnnnnnnnnnnnnnnnnnnnnnnnnnnnnnnnnnnnnnnnnnnnnnnnnnnnnnnnnnnnnnnnnnnnnnnnnnnnnnnnnnnnnnnnnnnnnnnnnnnnnnnnnnnnnnnnnnnnnnnnnnnnnnnnnnnnnnnnnnnnnnnnnnnnnnnnnnnnnnnnnnnnnnnnnnnnnnnnnnnnnnnnnnnnnnnnnnnnnnnnnnnnnnnnnnnnnnnnnnnnnnnnnnnnnnnnnnnnnnnnnnnnnnnnnnnnnnnnnnnnnnnnnnnnnnnnnnnnnnnnnnnnnnnnnnnnnnnnnnnnnnnnnnnnnnnnnnnnnnnnnnnnnnnnnnnnnnnnnnnnnnnnnnnnnnnnnnnnnnnnnnnnnnnnnnnnnnnnnnnnnnnnnnnnnnnnnnnnnnnnnnnnnnnnnnnnnnnnnnnnnnnnnnnnnnnnnnnnnnnnnnnnnnnnnnnnnnnnnnnnnnnnnnnnnnnnnnnnnnnnnnnnnnnnnnnnnnnnnnnnnnnnnnnnnnnnnnnnnnnnnnnnnnnnnnnnnnnnnnnnnnnnnnnnnnnnnnnnnnnnnnnnnnnnnnnnnnnnnnnnnnnnnnnnnnnnnnnnnnnnnnnnnnnnnnnnnnnnnnnnnnnnnnnnnnnnnnnnnnnnnnnnnnnnnnnnnnnnnnnnnnnnnnnnnnnnnnnnnnnnnnnnnnnnnnnnnnnnnnnnnnnnnnnnnnnnnnnnnnnnnnnnnnnnnnnnnnnnnnnnnnnnnnnnnnnnnnnnnnnnnnnnnnnnnnnnnnnnnnnnnnnnnnnnnnnnnnnnnnnnnnnnnnnnnnnnnnnnnnnnnnnnnnnnnnnnnnnnnnnnnnnnnnnnnnnnnnnnnnnnnnnnnnnnnnnnnnnnnnnnnnnnnnnnnnnnnnnnnnnnnnnnnnnnnnnnnnnnnnnnnnnnnnnnnnnnnnnnnnnnnnnnnnnnnnnnnnnnnnnnnnnnnnnnnnnnnnnnnnnnnnnnnnnnnnnnnnnnnnnnnnnnnnnnnnnnnnnnnnnnnnnnnnnnnnnnnnnnnnnnnnnnnnnnnnnnnnnnnnnnnnnnnnnnnnnnnnnnnnnnnnnnnnnnnnnnnnnnnnnnnnnnnnnnnnnnnnnnnnnnnnnnnnnnnnnnnnnnnnnnnnnnnnnnnnnnnnnnnnnnnnnnnnnnnnnnnnnnnnnnnnnnnnnnnnnnnnnnnnnnnnnnnnnnnnnnnnnnnnnnnnnnnnnnnnnnnnnnnnnnnnnnnnnnnnnnnnnnnnnnnnnnnnnnnnnnnnnnnnnnnnnnnnnnnnnnnnnnnnnnnnnnnnnnnnnnnnnnnnnnnnnnnnnnnnnnnnnnnnnnnnnnnnnnnnnnnnnnnnnnnnnnnnnnnnnnnnnnnnnnnnnnnnnnnnnnnnnnnnnnnnnnnnnnnnnnnnnnnnnnnnnnnnnnnnnnnnnnnnnnnnnnnnnnnnnnnnnnnnnnnnnnnnnnnnnnnnnnnnnnnnnnnnnnnnnnnnnnnnnnnnnnnnnnnnnnnnnnnnnnnnnnnnnnnnnnnnnnnnnnnnnnnnnnnnnnnnnnnnnnnnnnnnnnnnnnnnnnnnnnnnnnnnnnnnnnnnnnnnnnnnnnnnnnnnnnnnnnnnnnnnnnnnnnnnnnnnnnnnnnnnnnnnnnnnnnnnnnnnnnnnnnnnnnnnnnnnnnnnnnnnnnnnnnnnnnnnnnnnnnnnnnnnnnnnnnnnnnnnnnnnnnnnnnnnnnnnnnnnnnnnnnnnnnnnnnnnnnnnnnnnnnnnnnnnnnnnnnnnnnnnnnnnnnnnnnnnnnnnnnnnnnnnnnnnnnnnnnnnnnnnnnnnnnnnnnnnnnnnnnnnnnnnnnnnnnnnnnnnnnnnnnnnnnnnnnnnnnnnnnnnnnnnnnnnnnnnnnnnnnnnnnnnnnnnnnnnnnnnnnnnnnnnnnnnnnnnnnnnnnnnnnnnnnnnnnnnnnnnnnnnnnnnnnnnnnnnnnnnnnnnnnnnnnnnnnnnnnnnnnnnnnnnnnnnnnnnnnnnnnnnnnnnnnnnnnnnnnnnnnnnnnnnnnnnnnnnnnnnnnnnnnnnnnnnnnnnnnnnnnnnnnnnnnnnnnnnnnnnnnnnnnnnnnnnnnnnnnnnnnnnnnnnnnnnnnnnnnnnnnnnnnnnnnnnnnnnnnnnnnnnnnnnnnnnnnnnnnnnnnnnnnnnnnnnnnnnnnnnnnnnnnnnnnnnnnnnnnnnnnnnnnnnnnnnnnnnnnnnnnnnnnnnnnnnnnnnnnnnnnnnnnnnnnnnnnnnnnnnnnnnnnnnnnnnnnnnnnnnnnnnnnnnnnnnnnnnnnnnnnnnnnnnnnnnnnnnnnnnnnnnnnnnnnnnnnnnnnnnnnnnnnnnnnnnnnnnnnnnnnnnnnnnnnnnnnnnnnnnnnnnnnnnnnnnnnnnnnnnnnnnnnnnnnnnnnnnnnnnnnnnnnnnnnnnnnnnnnnnnnnnnnnnnnnnnnnnnnnnnnnnnnnnnnnnnnnnnnnnnnnnnnnnnnnnnnnnnnnnnnnnnnnnnnnnnnnnnnnnnnnnnnnnnnnnnnnnnnnnnnnnnnnnnnnnnnnnnnnnnnnnnnnnnnnnnnnnnnnnnnnnnnnnnnnnnnnnnnnnnnnnnnnnnnnnnnnnnnnnnnnnnnnnnnnnnnnnnnnnnnnnnnnnnnnnnnnnnnnnnnnnnnnnnnnnnnnnnnnnnnnnnnnnnnnnnnnnnnnnnnnnnnnnnnnnnnnnnnnnnnnnnnnnnnnnnnnnnnnnnnnnnnnnnnnnnnnnnnnnnnnnnnnnnnnnnnnnnnnnnnnnnnnnnnnnnnnnnnnnnnnnnnnnnnnnnnnnnnnnnnnnnnnnnnnnnnnnnnnnnnnnnnnnnnnnnnnnnnnnnnnnnnnnnnnnnnnnnnnnnnnnnnnnnnnnnnnnnnnnnnnnnnnnnnnnnnnnnnnnnnnnnnnnnnnnnnnnnnnnnnnnnnnnnnnnnnnnnnnnnnnnnnnnnnnnnnnnnnnnnnnnnnnnnnnnnnnnnnnnnnnnnnnnnnnnnnnnnnnnnnnnnnnnnnnnnnnnnnnnnnnnnnnnnnnnnnnnnnnnnnnnnnnnnnnnnnnnnnnnnnnnnnnnnnnnnnnnnnnnnnnnnnnnnnnnnnnnnnnnnnnnnnnnnnnnnnnnnnnnnnnnnnnnnnnnnnnnnnnnnnnnnnnnnnnnnnnnnnnnnnnnnnnnnnnnnnnnnnnnnnnnnnnnnnnnnnnnnnnnnnnnnnnnnnnnnnnnnnnnnnnnnnnnnnnnnnnnnnnnnnnnnnnnnnnnnnnnnnnnnnnnnnnnnnnnnnnnnnnnnnnnnnnnnnnnnnnnnnnnnnnnnnnnnnnnnnnnnnnnnnnnnnnnnnnnnnnnnnnnnnnnnnnnnnnnnnnnnnnnnnnnnnnnnnnnnnnnnnnnnnnnnnnnnnnnnnnnnnnnnnnnnnnnnnnnnnnnnnnnnnnnnnnnnnnnnnnnnnnnnnnnnnnnnnnnnnnnnnnnnnnnnnnnnnnnnnnnnnnnnnnnnnnnnnnnnnnnnnnnnnnnnnnnnnnnnnnnnnnnnnnnnnnnnnnnnnnnnnnnnnnnnnnnnnnnnnnnnnnnnnnnnnnnnnnnnnnnnnnnnnnnnnnnnnnnnnnnnnnnnnnnnnnnnnnnnnnnnnnnnnnnnnnnnnnnnnnnnnnnnnnnnnnnnnnnnnnnnnnnnnnnnnnnnnnnnnnnnnnnnnnnnnnnnnnnnnnnnnnnnnnnnnnnnnnnnnnnnnnnnnnnnnnnnnnnnnnnnnnnnnnnnnnnnnnnnnnnnnnnnnnnnnnnnnnnnnnnnnnnnnnnnnnnnnnnnnnnnnnnnnnnnnnnnnnnnnnnnnnnnnnnnnnnnnnnnnnnnnnnnnnnnnnnnnnnnnnnnnnnnnnnnnnnnnnnnnnnnnnnnnnnnnnnnnnnnnnnnnnnnnnnnnnnnnnnnnnnnnnnnnnnnnnnnnnnnnnnnnnnnnnnnnnnnnnnnnnnnnnnnnnnnnnnnnnnnnnnnnnnnnnnnnnnnnnnnnnnnnnnnnnnnnnnnnnnnnnnnnnnnnnnnnnnnnnnnnnnnnnnnnnnnnnnnnnnnnnnnnnnnnnnnnnnnnnnnnnnnnnnnnnnnnnnnnnnnnnnnnnnnnnnnnnnnnnnnnnnnnnnnnnnnnnnnnnnnnnnnnnnnnnnnnnnnnnnnnnnnnnnnnnnnnnnnnnnnnnnnnnnnnnnnnnnnnnnnnnnnnnnnnnnnnnnnnnnnnnnnnnnnnnnnnnnnnnnnnnnnnnnnnnnnnnnnnnnnnnnnnnnnnnnnnnnnnnnnnnnnnnnnnnnnnnnnnnnnnnnnnnnnnnnnnnnnnnnnnnnnnnnnnnnnnnnnnnnnnnnnnnnnnnnnnnnnnnnnnnnnnnnnnnnnnnnnnnnnnnnnnnnnnnnnnnnnnnnnnnnnnnnnnnnnnnnnnnnnnnnnnnnnnnnnnnnnnnnnnnnnnnnnnnnnnnnnnnnnnnnnnnnnnnnnnnnnnnnnnnnnnnnnnnnnnnnnnnnnnnnnnnnnnnnnnnnnnnnnnnnnnnnnnnnnnnnnnnnnnnnnnnnnnnnnnnnnnnnnnnnnnnnnnnnnnnnnnnnnnnnnnnnnnnnnnnnnnnnnnnnnnnnnnnnnnnnnnnnnnnnnnnnnnnnnnnnnnnnnnnnnnnnnnnnnnnnnnnnnnnnnnnnnnnnnnnnnnnnnnnnnnnnnnnnnnnnnnnnnnnnnnnnnnnnnnnnnnnnnnnnnnnnnnnnnnnnnnnnnnnnnnnnnnnnnnnnnnnnnnnnnnnnnnnnnnnnnnnnnnnnnnnnnnnnnnnnnnnnnnnnnnnnnnnnnnnnnnnnnnnnnnnnnnnnnnnnnnnnnnnnnnnnnnnnnnnnnnnnnnnnnnnnnnnnnnnnnnnnnnnnnnnnnnnnnnnnnnnnnnnnnnnnnnnnnnnnnnnnnnnnnnnnnnnnnnnnnnnnnnnnnnnnnnnnnnnnnnnnnnnnnnnnnnnnnnnnnnnnnnnnnnnnnnnnnnnnnnnnnnnnnnnnnnnnnnnnnnnnnnnnnnnnnnnnnnnnnnnnnnnnnnnnnnnnnnnnnnnnnnnnnnnnnnnnnnnnnnnnnnnnnnnnnnnnnnnnnnnnnnnnnnnnnnnnnnnnnnnnnnnnnnnnnnnnnnnnnnnnnnnnnnnnnnnnnnnnnnnnnnnnnnnnnnnnnnnnnnnnnnnnnnnnnnnnnnnnnnnnnnnnnnnnnnnnnnnnnnnnnnnnnnnnnnnnnnnnnnnnnnnnnnnnnnnnnnnnnnnnnnnnnnnnnnnnnnnnnnnnnnnnnnnnnnnnnnnnnnnnnnnnnnnnnnnnnnnnnnnnnnnnnnnnnnnnnnnnnnnnnnnnnnnnnnnnnnnnnnnnnnnnnnnnnnnnnnnnnnnnnnnnnnnnnnnnnnnnnnnnnnnnnnnnnnnnnnnnnnnnnnnnnnnnnnnnnnnnnnnnnnnnnnnnnnnnnnnnnnnnnnnnnnnnnnnnnnnnnnnnnnnnnnnnnnnnnnnnnnnnnnnnnnnnnnnnnnnnnnnnnnnnnnnnnnnnnnnnnnnnnnnnnnnnnnnnnnnnnnnnnnnnnnnnnnnnnnnnnnnnnnnnnnnnnnnnnnnnnnnnnnnnnnnnnnnnnnnnnnnnnnnnnnnnnnnnnnnnnnnnnnnnnnnnnnnnnnnnnnnnnnnnnnnnnnnnnnnnnnnnnnnnnnnnnnnnnnnnnnnnnnnnnnnnnnnnnnnnnnnnnnnnnnnnnnnnnnnnnnnnnnnnnnnnnnnnnnnnnnnnnnnnnnnnnnnnnnnnnnnnnnnnnnnnnnnnnnnnnnnnnnnnnnnnnnnnnnnnnnnnnnnnnnnnnnnnnnnnnnnnnnnnnnnnnnnnnnnnnnnnnnnnnnnnnnnnnnnnnnnnnnnnnnnnnnnnnnnnnnnnnnnnnnnnnnnnnnnnnnnnnnnnnnnnnnnnnnnnnnnnnnnnnnnnnnnnnnnnnnnnnnnnnnnnnnnnnnnnnnnnnnnnnnnnnnnnnnnnnnnnnnnnnnnnnnnnnnnnnnnnnnnnnnnnnnnnnnnnnnnnnnnnnnnnnnnnnnnnnnnnnnnnnnnnnnnnnnnnnnnnnnnnnnnnnnnnnnnnnnnnnnnnnnnnnnnnnnnnnnnnnnnnnnnnnnnnnnnnnnnnnnnnnnnnnnnnnnnnnnnnnnnnnnnnnnnnnnnnnnnnnnnnnnnnnnnnnnnnnnnnnnnnnnnnnnnnnnnnnnnnnnnnnnnnnnnnnnnnnnnnnnnnnnnnnnnnnnnnnnnnnnnnnnnnnnnnnnnnnnnnnnnnnnnnnnnnnnnnnnnnnnnnnnnnnnnnnnnnnnnnnnnnnnnnnnnnnnnnnnnnnnnnnnnnnnnnnnnnnnnnnnnnnnnnnnnnnnnnnnnnnnnnnnnnnnnnnnnnnnnnnnnnnnnnnnnnnnnnnnnnnnnnnnnnnnnnnnnnnnnnnnnnnnnnnnnnnnnnnnnnnnnnnnnnnnnnnnnnnnnnnnnnnnnnnnnnnnnnnnnnnnnnnnnnnnnnnnnnnnnnnnnnnnnnnnnnnnnnnnnnnnnnnnnnnnnnnnnnnnnnnnnnnnnnnnnnnnnnnnnnnnnnnnnnnnnnnnnnnnnnnnnnnnnnnnnnnnnnnnnnnnnnnnnnnnnnnnnnnnnnnnnnnnnnnnnnnnnnnnnnnnnnnnnnnnnnnnnnnnnnnnnnnnnnnnnnnnnnnnnnnnnnnnnnnnnnnnnnnnnnnnnnnnnnnnnnnnnnnnnnnnnnnnnnnnnnnnnnnnnnnnnnnnnnnnnnnnnnnnnnnnnnnnnnnnnnnnnnnnnnnnnnnnnnnnnnnnnnnnnnnnnnnnnnnnnnnnnnnnnnnnnnnnnnnnnnnnnnnnnnnnnnnnnnnnnnnnnnnnnnnnnnnnnnnnnnnnnnnnnnnnnnnnnnnnnnnnnnnnnnnnnnnnnnnnnnnnnnnnnnnnnnnnnnnnnnnnnnnnnnnnnnnnnnnnnnnnnnnnnnnnnnnnnnnnnnnnnnnnnnnnnnnnnnnnnnnnnnnnnnnnnnnnnnnnnnnnnnnnnnnnnnnnnnnnnnnnnnnnnnnnnnnnnnnnnnnnnnnnnnnnnnnnnnnnnnnnnnnnnnnnnnnnnnnnnnnnnnnnnnnnnnnnnnnnnnnnnnnnnnnnnnnnnnnnnnnnnnnnnnnnnnnnnnnnnnnnnnnnnnnnnnnnnnnnnnnnnnnnnnnnnnnnnnnnnnnnnnnnnnnnnnnnnnnnnnnnnnnnnnnnnnnnnnnnnnnnnnnnnnnnnnnnnnnnnnnnnnnnnnnnnnnnnnnnnnnnnnnnnnnnnnnnnnnnnnnnnnnnnnnnnnnnnnnnnnnnnnnnnnnnnnnnnnnnnnnnnnnnnnnnnnnnnnnnnnnnnnnnnnnnnnnnnnnnnnnnnnnnnnnnnnnnnnnnnnnnnnnnnnnnnnnnnnnnnnnnnnnnnnnnnnnnnnnnnnnnnnnnnnnnnnnnnnnnnnnnnnnnnnnnnnnnnnnnnnnnnnnnnnnnnnnnnnnnnnnnnnnnnnnnnnnnnnnnnnnnnnnnnnnnnnnnnnnnnnnnnnnnnnnnnnnnnnnnnnnnnnnnnnnnnnnnnnnnnnnnnnnnnnnnnnnnnnnnnnnnnnnnnnnnnnnnnnnnnnnnnnnnnnnnnnnnnnnnnnnnnnnnnnnnnnnnnnnnnnnnnnnnnnnnnnnnnnnnnnnnnnnnnnnnnnnnnnnnnnnnnnnnnnnnnnnnnnnnnnnnnnnnnnnnnnnnnnnnnnnnnnnnnnnnnnnnnnnnnnnnnnnnnnnnnnnnnnnnnnnnnnnnnnnnnnnnnnnnnnnnnnnnnnnnnnnnnnnnnnnnnnnnnnnnnnnnnnnnnnnnnnnnnnnnnnnnnnnnnnnnnnnnnnnnnnnnnnnnnnnnnnnnnnnnnnnnnnnnnnnnnnnnnnnnnnnnnnnnnnnnnnnnnnnnnnnnnnnnnnnnnnnnnnnnnnnnnnnnnnnnnnnnnnnnnnnnnnnnnnnnnnnnnnnnnnnnnnnnnnnnnnnnnnnnnnnnnnnnnnnnnnnnnnnnnnnnnnnnnnnnnnnnnnnnnnnnnnnnnnnnnnnnnnnnnnnnnnnnnnnnnnnnnnnnnnnnnnnnnnnnnnnnnnnnnnnnnnnnnnnnnnnnnnnnnnnnnnnnnnnnnnnnnnnnnnnnnnnnnnnnnnnnnnnnnnnnnnnnnnnnnnnnnnnnnnnnnnnnnnnnnnnnnnnnnnnnnnnnnnnnnnnnnnnnnnnnnnnnnnnnnnnnnnnnnnnnnnnnnnnnnnnnnnnnnnnnnnnnnnnnnnnnnnnnnnnnnnnnnnnnnnnnnnnnnnnnnnnnnnnnnnnnnnnnnnnnnnnnnnnnnnnnnnnnnnnnnnnnnnnnnnnnnnnnnnnnnnnnnnnnnnnnnnnnnnnnnnnnnnnnnnnnnnnnnnnnnnnnnnnnnnnnnnnnnnnnnnnnnnnnnnnnnnnnnnnnnnnnnnnnnnnnnnnnnnnnnnnnnnnnnnnnnnnnnnnnnnnnnnnnnnnnnnnnnnnnnnnnnnnnnnnnnnnnnnnnnnnnnnnnnnnnnnnnnnnnnnnnnnnnnnnnnnnnnnnnnnnnnnnnnnnnnnnnnnnnnnnnnnnnnnnnnnnnnnnnnnnnnnnnnnnnnnnnnnnnnnnnnnnnnnnnnnnnnnnnnnnnnnnnnnnnnnnnnnnnnnnnnnnnnnnnnnnnnnnnnnnnnnnnnnnnnnnnnnnnnnnnnnnnnnnnnnnnnnnnnnnnnnnnnnnnnnnnnnnnnnnnnnnnnnnnnnnnnnnnnnnnnnnnnnnnnnnnnnnnnnnnnnnnnnnnnnnnnnnnnnnnnnnnnnnnnnnnnnnnnnnnnnnnnnnnnnnnnnnnnnnnnnnnnnnnnnnnnnnnnnnnnnnnnnnnnnnnnnnnnnnnnnnnnnnnnnnnnnnnnnnnnnnnnnnnnnnnnnnnnnnnnnnnnnnnnnnnnnnnnnnnnnnnnnnnnnnnnnnnnnnnnnnnnnnnnnnnnnnnnnnnnnnnnnnnnnnnnnnnnnnnnnnnnnnnnnnnnnnnnnnnnnnnnnnnnnnnnnnnnnnnnnnnnnnnnnnnnnnnnnnnnnnnnnnnnnnnnnnnnnnnnnnnnnnnnnnnnnnnnnnnnnnnnnnnnnnnnnnnnnnnnnnnnnnnnnnnnnnnnnnnnnnnnnnnnnnnnnnnnnnnnnnnnnnnnnnnnnnnnnnnnnnnnnnnnnnnnnnnnnnnnnnnnnnnnnnnnnnnnnnnnnnnnnnnnnnnnnnnnnnnnnnnnnnnnnnnnnnnnnnnnnnnnnnnnnnnnnnnnnnnnnnnnnnnnnnnnnnnnnnnnnnnnnnnnnnnnnnnnnnnnnnnnnnnnnnnnnnnnnnnnnnnnnnnnnnnnnnnnnnnnnnnnnnnnnnnnnnnnnnnnnnnnnnnnnnnnnnnnnnnnnnnnnnnnnnnnnnnnnnnnnnnnnnnnnnnnnnnnnnnnnnnnnnnnnnnnnnnnnnnnnnnnnnnnnnnnnnnnnnnnnnnnnnnnnnnnnnnnnnnnnnnnnnnnnnnnnnnnnnnnnnnnnnnnnnnnnnnnnnnnnnnnnnnnnnnnnnnnnnnnnnnnnnnnnnnnnnnnnnnnnnnnnnnnnnnnnnnnnnnnnnnnnnnnnnnnnnnnnnnnnnnnnnnnnnnnnnnnnnnnnnnnnnnnnnnnnnnnnnnnnnnnnnnnnnnnnnnnnnnnnnnnnnnnnnnnnnnnnnnnnnnnnnnnnnnnnnnnnnnnnnnnnnnnnnnnnnnnnnnnnnnnnnnnnnnnnnnnnnnnnnnnnnnnnnnnnnnnnnnnnnnnnnnnnnnnnnnnnnnnnnnnnnnnnnnnnnnnnnnnnnnnnnnnnnnnnnnnnnnnnnnnnnnnnnnnnnnnnnnnnnnnnnnnnnnnnnnnnnnnnnnnnnnnnnnnnnnnnnnnnnnnnnnnnnnnnnnnnnnnnnnnnnnnnnnnnnnnnnnnnnnnnnnnnnnnnnnnnnnnnnnnnnnnnnnnnnnnnnnnnnnnnnnnnnnnnnnnnnnnnnnnnnnnnnnnnnnnnnnnnnnnnnnnnnnnnnnnnnnnnnnnnnnnnnnnnnnnnnnnnnnnnnnnnnnnnnnnnnnnnnnnnnnnnnnnnnnnnnnnnnnnnnnnnnnnnnnnnnnnnnnnnnnnnnnnnnnnnnnnnnnnnnnnnnnnnnnnnnnnnnnnnnnnnnnnnnnnnnnnnnnnnnnnnnnnnnnnnnnnnnnnnnnnnnnnnnnnnnnnnnnnnnnnnnnnnnnnnnnnnnnnnnnnnnnnnnnnnnnnnnnnnnnnnnnnnnnnnnnnnnnnnnnnnnnnnnnnnnnnnnnnnnnnnnnnnnnnnnnnnnnnnnnnnnnnnnnnnnnnnnnnnnnnnnnnnnnnnnnnnnnnnnnnnnnnnnnnnnnnnnnnnnnnnnnnnnnnnnnnnnnnnnnnnnnnnnnnnnnnnnnnnnnnnnnnnnnnnnnnnnnnnnnnnnnnnnnnnnnnnnnnnnnnnnnnnnnnnnnnnnnnnnnnnnnnnnnnnnnnnnnnnnnnnnnnnnnnnnnnnnnnnnnnnnnnnnnnnnnnnnnnnnnnnnnnnnnnnnnnnnnnnnnnnnnnnnnnnnnnnnnnnnnnnnnnnnnnnnnnnnnnnnnnnnnnnnnnnnnnnnnnnnnnnnnnnnnnnnnnnnnnnnnnnnnnnnnnnnnnnnnnnnnnnnnnnnnnnnnnnnnnnnnnnnnnnnnnnnnnnnnnnnnnnnnnnnnnnnnnnnnnnnnnnnnnnnnnnnnnnnnnnnnnnnnnnnnnnnnnnnnnnnnnnnnnnnnnnnnnnnnnnnnnnnnnnnnnnnnnnnnnnnnnnnnnnnnnnnnnnnnnnnnnnnnnnnnnnnnnnnnnnnnnnnnnnnnnnnnnnnnnnnnnnnnnnnnnnnnnnnnnnnnnnnnnnnnnnnnnnnnnnnnnnnnnnnnnnnnnnnnnnnnnnnnnnnnnnnnnnnnnnnnnnnnnnnnnnnnnnnnnnnnnnnnnnnnnnnnnnnnnnnnnnnnnnnnnnnnnnnnnnnnnnnnnnnnnnnnnnnnnnnnnnnnnnnnnnnnnnnnnnnnnnnnnnnnnnnnnnnnnnnnnnnnnnnnnnnnnnnnnnnnnnnnnnnnnnnnnnnnnnnnnnnnnnnnnnnnnnnnnnnnnnnnnnnnnnnnnnnnnnnnnnnnnnnnnnnnnnnnnnnnnnnnnnnnnnnnnnnnnnnnnnnnnnnnnnnnnnnnnnnnnnnnnnnnnnnnnnnnnnnnnnnnnnnnnnnnnnnnnnnnnnnnnnnnnnnnnnnnnnnnnnnnnnnnnnnnnnnnnnnnnnnnnnnnnnnnnnnnnnnnnnnnnnnnnnnnnnnnnnnnnnnnnnnnnnnnnnnnnnnnnnnnnnnnnnnnnnnnnnnnnnnnnnnnnnnnnnnnnnnnnnnnnnnnnnnnnnnnnnnnnnnnnnnnnnnnnnnnnnnnnnnnnnnnnnnnnnnnnnnnnnnnnnnnnnnnnnnnnnnnnnnnnnnnnnnnnnnnnnnnnnnnnnnnnnnnnnnnnnnnnnnnnnnnnnnnnnnnnnnnnnnnnnnnnnnnnnnnnnnnnnnnnnnnnnnnnnnnnnnnnnnnnnnnnnnnnnnnnnnnnnnnnnnnnnnnnnnnnnnnnnnnnnnnnnnnnnnnnnnnnnnnnnnnnnnnnnnnnnnnnnnnnnnnnnnnnnnnnnnnnnnnnnnnnnnnnnnnnnnnnnnnnnnnnnnnnnnnnnnnnnnnnnnnnnnnnnnnnnnnnnnnnnnnnnnnnnnnnnnnnnnnnnnnnnnnnnnnnnnnnnnnnnnnnnnnnnnnnnnnnnnnnnnnnnnnnnnnnnnnnnnnnnnnnnnnnnnnnnnnnnnnnnnnnnnnnnnnnnnnnnnnnnnnnnnnnnnnnnnnnnnnnnnnnnnnnnnnnnnnnnnnnnnnnnnnnnnnnnnnnnnnnnnnnnnnnnnnnnnnnnnnnnnnnnnnnnnnnnnnnnnnnnnnnnnnnnnnnnnnnnnnnnnnnnnnnnnnnnnnnnnnnnnnnnnnnnnnnnnnnnnnnnnnnnnnnnnnnnnnnnnnnnnnnnnnnnnnnnnnnnnnnnnnnnnnnnnnnnnnnnnnnnnnnnnnnnnnnnnnnnnnnnnnnnnnnnnnnnnnnnnnnnnnnnnnnnnnnnnnnnnnnnnnnnnnnnnnnnnnnnnnnnnnnnnnnnnnnnnnnnnnnnnnnnnnnnnnnnnnnnnnnnnnnnnnnnnnnnnnnnnnnnnnnnnnnnnnnnnnnnnnnnnnnnnnnnnnnnnnnnnnnnnnnnnnnnnnnnnnnnnnnnnnnnnnnnnnnnnnnnnnnnnnnnnnnnnnnnnnnnnnnnnnnnnnnnnnnnnnnnnnnnnnnnnnnnnnnnnnnnnnnnnnnnnnnnnnnnnnnnnnnnnnnnnnnnnnnnnnnnnnnnnnnnnnnnnnnnnnnnnnnnnnnnnnnnnnnnnnnnnnnnnnnnnnnnnnnnnnnnnnnnnnnnnnnnnnnnnnnnnnnnnnnnnnnnnnnnnnnnnnnnnnnnnnnnnnnnnnnnnnnnnnnnnnnnnnnnnnnnnnnnnnnnnnnnnnnnnnnnnnnnnnnnnnnnnnnnnnnnnnnnnnnnnnnnnnnnnnnnnnnnnnnnnnnnnnnnnnnnnnnnnnnnnnnnnnnnnnnnnnnnnnnnnnnnnnnnnnnnnnnnnnnnnnnnnnnnnnnnnnnnnnnnnnnnnnnnnnnnnnnnnnnnnnnnnnnnnnnnnnnnnnnnnnnnnnnnnnnnnnnnnnnnnnnnnnnnnnnnnnnnnnnnnnnnnnnnnnnnnnnnnnnnnnnnnnnnnnnnnnnnnnnnnnnnnnnnnnnnnnnnnnnnnnnnnnnnnnnnnnnnnnnnnnnnnnnnnnnnnnnnnnnnnnnnnnnnnnnnnnnnnnnnnnnnnnnnnnnnnnnnnnnnnnnnnnnnnnnnnnnnnnnnnnnnnnnnnnnnnnnnnnnnnnnnnnnnnnnnnnnnnnnnnnnnnnnnnnnnnnnnnnnnnnnnnnnnnnnnnnnnnnnnnnnnnnnnnnnnnnnnnnnnnnnnnnnnnnnnnnnnnnnnnnnnnnnnnnnnnnnnnnnnnnnnnnnnnnnnnnnnnnnnnnnnnnnnnnnnnnnnnnnnnnnnnnnnnnnnnnnnnnnnnnnnnnnnnnnnnnnnnnnnnnnnnnnnnnnnnnnnnnnnnnnnnnnnnnnnnnnnnnnnnnnnnnnnnnnnnnnnnnnnnnnnnnnnnnnnnnnnnnnnnnnnnnnnnnnnnnnnnnnnnnnnnnnnnnnnnnnnnnnnnnnnnnnnnnnnnnnnnnnnnnnnnnnnnnnnnnnnnnnnnnnnnnnnnnnnnnnnnnnnnnnnnnnnnnnnnnnnnnnnnnnnnnnnnnnnnnnnnnnnnnnnnnnnnnnnnnnnnnnnnnnnnnnnnnnnnnnnnnnnnnnnnnnnnnnnnnnnnnnnnnnnnnnnnnnnnnnnnnnnnnnnnnnnnnnnnnnnnnnnnnnnnnnnnnnnnnnnnnnnnnnnnnnnnnnnnnnnnnnnnnnnnnnnnnnnnnnnnnnnnnnnnnnnnnnnnnnnnnnnnnnnnnnnnnnnnnnnnnnnnnnnnnnnnnnnnnnnnnnnnnnnnnnnnnnnnnnnnnnnnnnnnnnnnnnnnnnnnnnnnnnnnnnnnnnnnnnnnnnnnnnnnnnnnnnnnnnnnnnnnnnnnnnnnnnnnnnnnnnnnnnnnnnnnnnnnnnnnnnnnnnnnnnnnnnnnnnnnnnnnnnnnnnnnnnnnnnnnnnnnnnnnnnnnnnnnnnnnnnnnnnnnnnnnnnnnnnnnnnnnnnnnnnnnnnnnnnnnnnnnnnnnnnnnnnnnnnnnnnnnnnnnnnnnnnnnnnnnnnnnnnnnnnnnnnnnnnnnnnnnnnnnnnnnnnnnnnnnnnnnnnnnnnnnnnnnnnnnnnnnnnnnnnnnnnnnnnnnnnnnnnnnnnnnnnnnnnnnnnnnnnnnnnnnnnnnnnnnnnnnnnnnnnnnnnnnnnnnnnnnnnnnnnnnnnnnnnnnnnnnnnnnnnnnnnnnnnnnnnnnnnnnnnnnnnnnnnnnnnnnnnnnnnnnnnnnnnnnnnnnnnnnnnnnnnnnnnnnnnnnnnnnnnnnnnnnnnnnnnnnnnnnnnnnnnnnnnnnnnnnnnnnnnnnnnnnnnnnnnnnnnnnnnnnnnnnnnnnnnnnnnnnnnnnnnnnnnnnnnnnnnnnnnnnnnnnnnnnnnnnnnnnnnnnnnnnnnnnnnnnnnnnnnnnnnnnnnnnnnnnnnnnnnnnnnnnnnnnnnnnnnnnnnnnnnnnnnnnnnnnnnnnnnnnnnnnnnnnnnnnnnnnnnnnnnnnnnnnnnnnnnnnnnnnnnnnnnnnnnnnnnnnnnnnnnnnnnnnnnnnnnnnnnnnnnnnnnnnnnnnnnnnnnnnnnnnnnnnnnnnnnnnnnnnnnnnnnnnnnnnnnnnnnnnnnnnnnnnnnnnnnnnnnnnnnnnnnnnnnnnnnnnnnnnnnnnnnnnnnnnnnnnnnnnnnnnnnnnnnnnnnnnnnnnnnnnnnnnnnnnnnnnnnnnnnnnnnnnnnnnnnnnnnnnnnnnnnnnnnnnnnnnnnnnnnnnnnnnnnnnnnnnnnnnnnnnnnnnnnnnnnnnnnnnnnnnnnnnnnnnnnnnnnnnnnnnnnnnnnnnnnnnnnnnnnnnnnnnnnnnnnnnnnnnnnnnnnnnnnnnnnnnnnnnnnnnnnnnnnnnnnnnnnnnnnnnnnnnnnnnnnnnnnnnnnnnnnnnnnnnnnnnnnnnnnnnnnnnnnnnnnnnnnnnnnnnnnnnnnnnnnnnnnnnnnnnnnnnnnnnnnnnnnnnnnnnnnnnnnnnnnnnnnnnnnnnnnnnnnnnnnnnnnnnnnnnnnnnnnnnnnnnnnnnnnnnnnnnnnnnnnnnnnnnnnnnnnnnnnnnnnnnnnnnnnnnnnnnnnnnnnnnnnnnnnnnnnnnnnnnnnnnnnnnnnnnnnnnnnnnnnnnnnnnnnnnnnnnnnnnnnnnnnnnnnnnnnnnnnnnnnnnnnnnnnnnnnnnnnnnnnnnnnnnnnnnnnnnnnnnnnnnnnnnnnnnnnnnnnnnnnnnnnnnnnnnnnnnnnnnnnnnnnnnnnnnnnnnnnnnnnnnnnnnnnnnnnnnnnnnnnnnnnnnnnnnnnnnnnnnnnnnnnnnnnnnnnnnnnnnnnnnnnnnnnnnnnnnnnnnnnnnnnnnnnnnnnnnnnnnnnnnnnnnnnnnnnnnnnnnnnnnnnnnnnnnnnnnnnnnnnnnnnnnnnnnnnnnnnnnnnnnnnnnnnnnnnnnnnnnnnnnnnnnnnnnnnnnnnnnnnnnnnnnnnnnnnnnnnnnnnnnnnnnnnnnnnnnnnnnnnnnnnnnnnnnnnnnnnnnnnnnnnnnnnnnnnnnnnnnnnnnnnnnnnnnnnnnnnnnnnnnnnnnnnnnnnnnnnnnnnnnnnnnnnnnnnnnnnnnnnnnnnnnnnnnnnnnnnnnnnnnnnnnnnnnnnnnnnnnnnnnnnnnnnnnnnnnnnnnnnnnnnnnnnnnnnnnnnnnnnnnnnnnnnnnnnnnnnnnnnnnnnnnnnnnnnnnnnnnnnnnnnnnnnnnnnnnnnnnnnnnnnnnnnnnnnnnnnnnnnnnnnnnnnnnnnnnnnnnnnnnnnnnnnnnnnnnnnnnnnnnnnnnnnnnnnnnnnnnnnnnnnnnnnnnnnnnnnnnnnnnnnnnnnnnnnnnnnnnnnnnnnnnnnnnnnnnnnnnnnnnnnnnnnnnnnnnnnnnnnnnnnnnnnnnnnnnnnnnnnnnnnnnnnnnnnnnnnnnnnnnnnnnnnnnnnnnnnnnnnnnnnnnnnnnnnnnnnnnnnnnnnnnnnnnnnnnnnnnnnnnnnnnnnnnnnnnnnnnnnnnnnnnnnnnnnnnnnnnnnnnnnnnnnnnnnnnnnnnnnnnnnnnnnnnnnnnnnnnnnnnnnnnnnnnnnnnnnnnnnnnnnnnnnnnnnnnnnnnnnnnnnnnnnnnnnnnnnnnnnnnnnnnnnnnnnnnnnnnnnnnnnnnnnnnnnnnnnnnnnnnnnnnnnnnnnnnnnnnnnnnnnnnnnnnnnnnnnnnnnnnnnnnnnnnnnnnnnnnnnnnnnnnnnnnnnnnnnnnnnnnnnnnnnnnnnnnnnnnnnnnnnnnnnnnnnnnnnnnnnnnnnnnnnnnnnnnnnnnnnnnnnnnnnnnnnnnnnnnnnnnnnnnnnnnnnnnnnnnnnnnnnnnnnnnnnnnnnnnnnnnnnnnnnnnnnnnnnnnnnnnnnnnnnnnnnnnnnnnnnnnnnnnnnnnnnnnnnnnnnnnnnnnnnnnnnnnnnnnnnnnnnnnnnnnnnnnnnnnnnnnnnnnnnnnnnnnnnnnnnnnnnnnnnnnnnnnnnnnnnnnnnnnnnnnnnnnnnnnnnnnnnnnnnnnnnnnnnnnnnnnnnnnnnnnnnnnnnnnnnnnnnnnnnnnnnnnnnnnnnnnnnnnnnnnnnnnnnnnnnnnnnnnnnnnnnnnnnnnnnnnnnnnnnnnnnnnnnnnnnnnnnnnnnnnnnnnnnnnnnnnnnnnnnnnnnnnnnnnnnnnnnnnnnnnnnnnnnnnnnnnnnnnnnnnnnnnnnnnnnnnnnnnnnnnnnnnnnnnnnnnnnnnnnnnnnnnnnnnnnnnnnnnnnnnnnnnnnnnnnnnnnnnnnnnnnnnnnnnnnnnnnnnnnnnnnnnnnnnnnnnnnnnnnnnnnnnnnnnnnnnnnnnnnnnnnnnnnnnnnnnnnnnnnnnnnnnnnnnnnnnnnnnnnnnnnnnnnnnnnnnnnnnnnnnnnnnnnnnnnnnnnnnnnnnnnnnnnnnnnnnnnnnnnnnnnnnnnnnnnnnnnnnnnnnnnnnnnnnnnnnnnnnnnnnnnnnnnnnnnnnnnnnnnnnnnnnnnnnnnnnnnnnnnnnnnnnnnnnnnnnnnnnnnnnnnnnnnnnnnnnnnnnnnnnnnnnnnnnnnnnnnnnnnnnnnnnnnnnnnnnnnnnnnnnnnnnnnnnnnnnnnnnnnnnnnnnnnnnnnnnnnnnnnnnnnnnnnnnnnnnnnnnnnnnnnnnnnnnnnnnnnnnnnnnnnnnnnnnnnnnnnnnnnnnnnnnnnnnnnnnnnnnnnnnnnnnnnnnnnnnnnnnnnnnnnnnnnnnnnnnnnnnnnnnnnnnnnnnnnnnnnnnnnnnnnnnnnnnnnnnnnnnnnnnnnnnnnnnnnnnnnnnnnnnnnnnnnnnnnnnnnnnnnnnnnnnnnnnnnnnnnnnnnnnnnnnnnnnnnnnnnnnnnnnnnnnnnnnnnnnnnnnnnnnnnnnnnnnnnnnnnnnnnnnnnnnnnnnnnnnnnnnnnnnnnnnnnnnnnnnnnnnnnnnnnnnnnnnnnnnnnnnnnnnnnnnnnnnnnnnnnnnnnnnnnnnnnnnnnnnnnnnnnnnnnnnnnnnnnnnnnnnnnnnnnnnnnnnnnnnnnnnnnnnnnnnnnnnnnnnnnnnnnnnnnnnnnnnnnnnnnnnnnnnnnnnnnnnnnnnnnnnnnnnnnnnnnnnnnnnnnnnnnnnnnnnnnnnnnnnnnnnnnnnnnnnnnnnnnnnnnnnnnnnnnnnnnnnnnnnnnnnnnnnnnnnnnnnnnnnnnnnnnnnnnnnnnnnnnnnnnnnnnnnnnnnnnnnnnnnnnnnnnnnnnnnnnnnnnnnnnnnnnnnnnnnnnnnnnnnnnnnnnnnnnnnnnnnnnnnnnnnnnnnnnnnnnnnnnnnnnnnnnnnnnnnnnnnnnnnnnnnnnnnnnnnnnnnnnnnnnnnnnnnnnnnnnnnnnnnnnnnnnnnnnnnnnnnnnnnnnnnnnnnnnnnnnnnnnnnnnnnnnnnnnnnnnnnnnnnnnnnnnnnnnnnnnnnnnnnnnnnnnnnnnnnnnnnnnnnnnnnnnnnnnnnnnnnnnnnnnnnnnnnnnnnnnnnnnnnnnnnnnnnnnnnnnnnnnnnnnnnnnnnnnnnnnnnnnnnnnnnnnnnnnnnnnnnnnnnnnnnnnnnnnnnnnnnnnnnnnnnnnnnnnnnnnnnnnnnnnnnnnnnnnnnnnnnnnnnnnnnnnnnnnnnnnnnnnnnnnnnnnnnnnnnnnnnnnnnnnnnnnnnnnnnnnnnnnnnnnnnnnnnnnnnnnnnnnnnnnnnnnnnnnnnnnnnnnnnnnnnnnnnnnnnnnnnnnnnnnnnnnnnnnnnnnnnnnnnnnnnnnnnnnnnnnnnnnnnnnnnnnnnnnnnnnnnnnnnnnnnnnnnnnnnnnnnnnnnnnnnnnnnnnnnnnnnnnnnnnnnnnnnnnnnnnnnnnnnnnnnnnnnnnnnnnnnnnnnnnnnnnnnnnnnnnnnnnnnnnnnnnnnnnnnnnnnnnnnnnnnnnnnnnnnnnnnnnnnnnnnnnnnnnnnnnnnnnnnnnnnnnnnnnnnnnnnnnnnnnnnnnnnnnnnnnnnnnnnnnnnnnnnnnnnnnnnnnnnnnnnnnnnnnnnnnnnnnnnnnnnnnnnnnnnnnnnnnnnnnnnnnnnnnnnnnnnnnnnnnnnnnnnnnnnnnnnnnnnnnnnnnnnnnnnnnnnnnnnnnnnnnnnnnnnnnnnnnnnnnnnnnnnnnnnnnnnnnnnnnnnnnnnnnnnnnnnnnnnnnnnnnnnnnnnnnnnnnnnnnnnnnnnnnnnnnnnnnnnnnnnnnnnnnnnnnnnnnnnnnnnnnnnnnnnnnnnnnnnnnnnnnnnnnnnnnnnnnnnnnnnnnnnnnnnnnnnnnnnnnnnnnnnnnnnnnnnnnnnnnnnnnnnnnnnnnnnnnnnnnnnnnnnnnnnnnnnnnnnnnnnnnnnnnnnnnnnnnnnnnnnnnnnnnnnnnnnnnnnnnnnnnnnnnnnnnnnnnnnnnnnnnnnnnnnnnnnnnnnnnnnnnnnnnnnnnnnnnnnnnnnnnnnnnnnnnnnnnnnnnnnnnnnnnnnnnnnnnnnnnnnnnnnnnnnnnnnnnnnnnnnnnnnnnnnnnnnnnnnnnnnnnnnnnnnnnnnnnnnnnnnnnnnnnnnnnnnnnnnnnnnnnnnnnnnnnnnnnnnnnnnnnnnnnnnnnnnnnnnnnnnnnnnnnnnnnnnnnnnnnnnnnnnnnnnnnnnnnnnnnnnnnnnnnnnnnnnnnnnnnnnnnnnnnnnnnnnnnnnnnnnnnnnnnnnnnnnnnnnnnnnnnnnnnnnnnnnnnnnnnnnnnnnnnnnnnnnnnnnnnnnnnnnnnnnnnnnnnnnnnnnnnnnnnnnnnnnnnnnnnnnnnnnnnnnnnnnnnnnnnnnnnnnnnnnnnnnnnnnnnnnnnnnnnnnnnnnnnnnnnnnnnnnnnnnnnnnnnnnnnnnnnnnnnnnnnnnnnnnnnnnnnnnnnnnnnnnnnnnnnnnnnnnnnnnnnnnnnnnnnnnnnnnnnnnnnnnnnnnnnnnnnnnnnnnnnnnnnnnnnnnnnnnnnnnnnnnnnnnnnnnnnnnnnnnnnnnnnnnnnnnnnnnnnnnnnnnnnnnnnnnnnnnnnnnnnnnnnnnnnnnnnnnnnnnnnnnnnnnnnnnnnnnnnnnnnnnnnnnnnnnnnnnnnnnnnnnnnnnnnnnnnnnnnnnnnnnnnnnnnnnnnnnnnnnnnnnnnnnnnnnnnnnnnnnnnnnnnnnnnnnnnnnnnnnnnnnnnnnnnnnnnnnnnnnnnnnnnnnnnnnnnnnnnnnnnnnnnnnnnnnnnnnnnnnnnnnnnnnnnnnnnnnnnnnnnnnnnnnnnnnnnnnnnnnnnnnnnnnnnnnnnnnnnnnnnnnnnnnnnnnnnnnnnnnnnnnnnnnnnnnnnnnnnnnnnnnnnnnnnnnnnnnnnnnnnnnnnnnnnnnnnnnnnnnnnnnnnnnnnnnnnnnnnnnnnnnnnnnnnnnnnnnnnnnnnnnnnnnnnnnnnnnnnnnnnnnnnnnnnnnnnnnnnnnnnnnnnnnnnnnnnnnnnnnnnnnnnnnnnnnnnnnnnnnnnnnnnnnnnnnnnnnnnnnnnnnnnnnnnnnnnnnnnnnnnnnnnnnnnnnnnnnnnnnnnnnnnnnnnnnnnnnnnnnnnnnnnnnnnnnnnnnnnnnnnnnnnnnnnnnnnnnnnnnnnnnnnnnnnnnnnnnnnnnnnnnnnnnnnnnnnnnnnnnnnnnnnnnnnnnnnnnnnnnnnnnnnnnnnnnnnnnnnnnnnnnnnnnnnnnnnnnnnnnnnnnnnnnnnnnnnnnnnnnnnnnnnnnnnnnnnnnnnnnnnnnnnnnnnnnnnnnnnnnnnnnnnnnnnnnnnnnnnnnnnnnnnnnnnnnnnnnnnnnnnnnnnnnnnnnnnnnnnnnnnnnnnnnnnnnnnnnnnnnnnnnnnnnnnnnnnnnnnnnnnnnnnnnnnnnnnnnnnnnnnnnnnnnnnnnnnnnnnnnnnnnnnnnnnnnnnnnnnnnnnnnnnnnnnnnnnnnnnnnnnnnnnnnnnnnnnnnnnnnnnnnnnnnnnnnnnnnnnnnnnnnnnnnnnnnnnnnnnnnnnnnnnnnnnnnnnnnnnnnnnnnnnnnnnnnnnnnnnnnnnnnnnnnnnnnnnnnnnnnnnnnnnnnnnnnnnnnnnnnnnnnnnnnnnnnnnnnnnnnnnnnnnnnnnnnnnnnnnnnnnnnnnnnnnnnnnnnnnnnnnnnnnnnnnnnnnnnnnnnnnnnnnnnnnnnnnnnnnnnnnnnnnnnnnnnnnnnnnnnnnnnnnnnnnnnnnnnnnnnnnnnnnnnnnnnnnnnnnnnnnnnnnnnnnnnnnnnnnnnnnnnnnnnnnnnnnnnnnnnnnnnnnnnnnnnnnnnnnnnnnnnnnnnnnnnnnnnnnnnnnnnnnnnnnnnnnnnnnnnnnnnnnnnnnnnnnnnnnnnnnnnnnnnnnnnnnnnnnnnnnnnnnnnnnnnnnnnnnnnnnnnnnnnnnnnnnnnnnnnnnnnnnnnnnnnnnnnnnnnnnnnnnnnnnnnnnnnnnnnnnnnnnnnnnnnnnnnnnnnnnnnnnnnnnnnnnnnnnnnnnnnnnnnnnnnnnnnnnnnnnnnnnnnnnnnnnnnnnnnnnnnnnnnnnnnnnnnnnnnnnnnnnnnnnnnnnnnnnnnnnnnnnnnnnnnnnnnnnnnnnnnnnnnnnnnnnnnnnnnnnnnnnnnnnnnnnnnnnnnnnnnnnnnnnnnnnnnnnnnnnnnnnnnnnnnnnnnnnnnnnnnnnnnnnnnnnnnnnnnnnnnnnnnnnnnnnnnnnnnnnnnnnnnnnnnnnnnnnnnnnnnnnnnnnnnnnnnnnnnnnnnnnnnnnnnnnnnnnnnnnnnnnnnnnnnnnnnnnnnnnnnnnnnnnnnnnnnnnnnnnnnnnnnnnnnnnnnnnnnnnnnnnnnnnnnnnnnnnnnnnnnnnnnnnnnnnnnnnnnnnnnnnnnnnnnnnnnnnnnnnnnnnnnnnnnnnnnnnnnnnnnnnnnnnnnnnnnnnnnnnnnnnnnnnnnnnnnnnnnnnnnnnnnnnnnnnnnnnnnnnnnnnnnnnnnnnnnnnnnnnnnnnnnnnnnnnnnnnnnnnnnnnnnnnnnnnnnnnnnnnnnnnnnnnnnnnnnnnnnnnnnnnnnnnnnnnnnnnnnnnnnnnnnnnnnnnnnnnnnnnnnnnnnnnnnnnnnnnnnnnnnnnnnnnnnnnnnnnnnnnnnnnnnnnnnnnnnnnnnnnnnnnnnnnnnnnnnnnnnnnnnnnnnnnnnnnnnnnnnnnnnnnnnnnnnnnnnnnnnnnnnnnnnnnnnnnnnnnnnnnnnnnnnnnnnnnnnnnnnnnnnnnnnnnnnnnnnnnnnnnnnnnnnnnnnnnnnnnnnnnnnnnnnnnnnnnnnnnnnnnnnnnnnnnnnnnnnnnnnnnnnnnnnnnnnnnnnnnnnnnnnnnnnnnnnnnnnnnnnnnnnnnnnnnnnnnnnnnnnnnnnnnnnnnnnnnnnnnnnnnnnnnnnnnnnnnnnnnnnnnnnnnnnnnnnnnnnnnnnnnnnnnnnnnnnnnnnnnnnnnnnnnnnnnnnnnnnnnnnnnnnnnnnnnnnnnnnnnnnnnnnnnnnnnnnnnnnnnnnnnnnnnnnnnnnnnnnnnnnnnnnnnnnnnnnnnnnnnnnnnnnnnnnnnnnnnnnnnnnnnnnnnnnnnnnnnnnnnnnnnnnnnnnnnnnnnnnnnnnnnnnnnnnnnnnnnnnnnnnnnnnnnnnnnnnnnnnnnnnnnnnnnnnnnnnnnnnnnnnnnnnnnnnnnnnnnnnnnnnnnnnnnnnnnnnnnnnnnnnnnnnnnnnnnnnnnnnnnnnnnnnnnnnnnnnnnnnnnnnnnnnnnnnnnnnnnnnnnnnnnnnnnnnnnnnnnnnnnnnnnnnnnnnnnnnnnnnnnnnnnnnnnnnnnnnnnnnnnnnnnnnnnnnnnnnnnnnnnnnnnnnnnnnnnnnnnnnnnnnnnnnnnnnnnnnnnnnnnnnnnnnnnnnnnnnnnnnnnnnnnnnnnnnnnnnnnnnnnnnnnnnnnnnnnnnnnnnnnnnnnnnnnnnnnnnnnnnnnnnnnnnnnnnnnnnnnnnnnnnnnnnnnnnnnnnnnnnnnnnnnnnnnnnnnnnnnnnnnnnnnnnnnnnnnnnnnnnnnnnnnnnnnnnnnnnnnnnnnnnnnnnnnnnnnnnnnnnnnnnnnnnnnnnnnnnnnnnnnnnnnnnnnnnnnnnnnnnnnnnnnnnnnnnnnnnnnnnnnnnnnnnnnnnnnnnnnnnnnnnnnnnnnnnnnnnnnnnnnnnnnnnnnnnnnnnnnnnnnnnnnnnnnnnnnnnnnnnnnnnnnnnnnnnnnnnnnnnnnnnnnnnnnnnnnnnnnnnnnnnnnnnnnnnnnnnnnnnnnnnnnnnnnnnnnnnnnnnnnnnnnnnnnnnnnnnnnnnnnnnnnnnnnnnnnnnnnnnnnnnnnnnnnnnnnnnnnnnnnnnnnnnnnnnnnnnnnnnnnnnnnnnnnnnnnnnnnnnnnnnnnnnnnnnnnnnnnnnnnnnnnnnnnnnnnnnnnnnnnnnnnnnnnnnnnnnnnnnnnnnnnnnnnnnnnnnnnnnnnnnnnnnnnnnnnnnnnnnnnnnnnnnnnnnnnnnnnnnnnnnnnnnnnnnnnnnnnnnnnnnnnnnnnnnnnnnnnnnnnnnnnnnnnnnnnnnnnnnnnnnnnnnnnnnnnnnnnnnnnnnnnnnnnnnnnnnnnnnnnnnnnnnnnnnnnnnnnnnnnnnnnnnnnnnnnnnnnnnnnnnnnnnnnnnnnnnnnnnnnnnnnnnnnnnnnnnnnnnnnnnnnnnnnnnnnnnnnnnnnnnnnnnnnnnnnnnnnnnnnnnnnnnnnnnnnnnnnnnnnnnnnnnnnnnnnnnnnnnnnnnnnnnnnnnnnnnnnnnnnnnnnnnnnnnnnnnnnnnnnnnnnnnnnnnnnnnnnnnnnnnnnnnnnnnnnnnnnnnnnnnnnnnnnnnnnnnnnnnnnnnnnnnnnnnnnnnnnnnnnnnnnnnnnnnnnnnnnnnnnnnnnnnnnnnnnnnnnnnnnnnnnnnnnnnnnnnnnnnnnnnnnnnnnnnnnnnnnnnnnnnnnnnnnnnnnnnnnnnnnnnnnnnnnnnnnnnnnnnnnnnnnnnnnnnnnnnnnnnnnnnnnnnnnnnnnnnnnnnnnnnnnnnnnnnnnnnnnnnnnnnnnnnnnnnnnnnnnnnnnnnnnnnnnnnnnnnnnnnnnnnnnnnnnnnnnnnnnnnnnnnnnnnnnnnnnnnnnnnnnnnnnnnnnnnnnnnnnnnnnnnnnnnnnnnnnnnnnnnnnnnnnnnnnnnnnnnnnnnnnnnnnnnnnnnnnnnnnnnnnnnnnnnnnnnnnnnnnnnnnnnnnnnnnnnnnnnnnnnnnnnnnnnnnnnnnnnnnnnnnnnnnnnnnnnnnnnnnnnnnnnnnnnnnnnnnnnnnnnnnnnnnnnnnnnnnnnnnnnnnnnnnnnnnnnnnnnnnnnnnnnnnnnnnnnnnnnnnnnnnnnnnnnnnnnnnnnnnnnnnnnnnnnnnnnnnnnnnnnnnnnnnnnnnnnnnnnnnnnnnnnnnnnnnnnnnnnnnnnnnnnnnnnnnnnnnnnnnnnnnnnnnnnnnnnnnnnnnnnnnnnnnnnnnnnnnnnnnnnnnnnnnnnnnnnnnnnnnnnnnnnnnnnnnnnnnnnnnnnnnnnnnnnnnnnnnnnnnnnnnnnnnnnnnnnnnnnnnnnnnnnnnnnnnnnnnnnnnnnnnnnnnnnnnnnnnnnnnnnnnnnnnnnnnnnnnnnnnnnnnnnnnnnnnnnnnnnnnnnnnnnnnnnnnnnnnnnnnnnnnnnnnnnnnnnnnnnnnnnnnnnnnnnnnnnnnnnnnnnnnnnnnnnnnnnnnnnnnnnnnnnnnnnnnnnnnnnnnnnnnnnnnnnnnnnnnnnnnnnnnnnnnnnnnnnnnnnnnnnnnnnnnnnnnnnnnnnnnnnnnnnnnnnnnnnnnnnnnnnnnnnnnnnnnnnnnnnnnnnnnnnnnnnnnnnnnnnnnnnnnnnnnnnnnnnnnnnnnnnnnnnnnnnnnnnnnnnnnnnnnnnnnnnnnnnnnnnnnnnnnnnnnnnnnnnnnnnnnnnnnnnnnnnnnnnnnnnnnnnnnnnnnnnnnnnnnnnnnnnnnnnnnnnnnnnnnnnnnnnnnnnnnnnnnnnnnnnnnnnnnnnnnnnnnnnnnnnnnnnnnnnnnnnnnnnnnnnnnnnnnnnnnnnnnnnnnnnnnnnnnnnnnnnnnnnnnnnnnnnnnnnnnnnnnnnnnnnnnnnnnnnnnnnnnnnnnnnnnnnnnnnnnnnnnnnnnnnnnnnnnnnnnnnnnnnnnnnnnnnnnnnnnnnnnnnnnnnnnnnnnnnnnnnnnnnnnnnnnnnnnnnnnnnnnnnnnnnnnnnnnnnnnnnnnnnnnnnnnnnnnnnnnnnnnnnnnnnnnnnnnnnnnnnnnnnnnnnnnnnnnnnnnnnnnnnnnnnnnnnnnnnnnnnnnnnnnnnnnnnnnnnnnnnnnnnnnnnnnnnnnnnnnnnnnnnnnnnnnnnnnnnnnnnnnnnnnnnnnnnnnnnnnnnnnnnnnnnnnnnnnnnnnnnnnnnnnnnnnnnnnnnnnnnnnnnnnnnnnnnnnnnnnnnnnnnnnnnnnnnnnnnnnnnnnnnnnnnnnnnnnnnnnnnnnnnnnnnnnnnnnnnnnnnnnnnnnnnnnnnnnnnnnnnnnnnnnnnnnnnnnnnnnnnnnnnnnnnnnnnnnnnnnnnnnnnnnnnnnnnnnnnnnnnnnnnnnnnnnnnnnnnnnnnnnnnnnnnnnnnnnnnnnnnnnnnnnnnnnnnnnnnnnnnnnnnnnnnnnnnnnnnnnnnnnnnnnnnnnnnnnnnnnnnnnnnnnnnnnnnnnnnnnnnnnnnnnnnnnnnnnnnnnnnnnnnnnnnnnnnnnnnnnnnnnnnnnnnnnnnnnnnnnnnnnnnnnnnnnnnnnnnnnnnnnnnnnnnnnnnnnnnnnnnnnnnnnnnnnnnnnnnnnnnnnnnnnnnnnnnnnnnnnnnnnnnnnnnnnnnnnnnnnnnnnnnnnnnnnnnnnnnnnnnnnnnnnnnnnnnnnnnnnnnnnnnnnnnnnnnnnnnnnnnnnnnnnnnnnnnnnnnnnnnnnnnnnnnnnnnnnnnnnnnnnnnnnnnnnnnnnnnnnnnnnnnnnnnnnnnnnnnnnnnnnnnnnnnnnnnnnnnnnnnnnnnnnnnnnnnnnnnnnnnnnnnnnnnnnnnnnnnnnnnnnnnnnnnnnnnnnnnnnnnnnnnnnnnnnnnnnnnnnnnnnnnnnnnnnnnnnnnnnnnnnnnnnnnnnnnnnnnnnnnnnnnnnnnnnnnnnnnnnnnnnnnnnnnnnnnnnnnnnnnnnnnnnnnnnnnnnnnnnnnnnnnnnnnnnnnnnnnnnnnnnnnnnnnnnnnnnnnnnnnnnnnnnnnnnnnnnnnnnnnnnnnnnnnnnnnnnnnnnnnnnnnnnnnnnnnnnnnnnnnnnnnnnnnnnnnnnnnnnnnnnnnnnnnnnnnnnnnnnnnnnnnnnnnnnnnnnnnnnnnnnnnnnnnnnnnnnnnnnnnnnnnnnnnnnnnnnnnnnnnnnnnnnnnnnnnnnnnnnnnnnnnnnnnnnnnnnnnnnnnnnnnnnnnnnnnnnnnnnnnnnnnnnnnnnnnnnnnnnnnnnnnnnnnnnnnnnnnnnnnnnnnnnnnnnnnnnnnnnnnnnnnnnnnnnnnnnnnnnnnnnnnnnnnnnnnnnnnnnnnnnnnnnnnnnnnnnnnnnnnnnnnnnnnnnnnnnnnnnnnnnnnnnnnnnnnnnnnnnnnnnnnnnnnnnnnnnnnnnnnnnnnnnnnnnnnnnnnnnnnnnnnnnnnnnnnnnnnnnnnnnnnnnnnnnnnnnnnnnnnnnnnnnnnnnnnnnnnnnnnnnnnnnnnnnnnnnnnnnnnnnnnnnnnnnnnnnnnnnnnnnnnnnnnnnnnnnnnnnnnnnnnnnnnnnnnnnnnnnnnnnnnnnnnnnnnnnnnnnnnnnnnnnnnnnnnnnnnnnnnnnnnnnnnnnnnnnnnnnnnnnnnnnnnnnnnnnnnnnnnnnnnnnnnnnnnnnnnnnnnnnnnnnnnnnnnnnnnnnnnnnnnnnnnnnnnnnnnnnnnnnnnnnnnnnnnnnnnnnnnnnnnnnnnnnnnnnnnnnnnnnnnnnnnnnnnnnnnnnnnnnnnnnnnnnnnnnnnnnnnnnnnnnnnnnnnnnnnnnnnnnnnnnnnnnnnnnnnnnnnnnnnnnnnnnnnnnnnnnnnnnnnnnnnnnnnnnnnnnnnnnnnnnnnnnnnnnnnnnnnnnnnnnnnnnnnnnnnnnnnnnnnnnnnnnnnnnnnnnnnnnnnnnnnnnnnnnnnnnnnnnnnnnnnnnnnnnnnnnnnnnnnnnnnnnnnnnnnnnnnnnnnnnnnnnnnnnnnnnnnnnnnnnnnnnnnnnnnnnnnnnnnnnnnnnnnnnnnnnnnnnnnnnnnnnnnnnnnnnnnnnnnnnnnnnnnnnnnnnnnnnnnnnnnnnnnnnnnnnnnnnnnnnnnnnnnnnnnnnnnnnnnnnnnnnnnnnnnnnnnnnnnnnnnnnnnnnnnnnnnnnnnnnnnnnnnnnnnnnnnnnnnnnnnnnnnnnnnnnnnnnnnnnnnnnnnnnnnnnnnnnnnnnnnnnnnnnnnnnnnnnnnnnnnnnnnnnnnnnnnnnnnnnnnnnnnnnnnnnnnnnnnnnnnnnnnnnnnnnnnnnnnnnnnnnnnnnnnnnnnnnnnnnnnnnnnnnnnnnnnnnnnnnnnnnnnnnnnnnnnnnnnnnnnnnnnnnnnnnnnnnnnnnnnnnnnnnnnnnnnnnnnnnnnnnnnnnnnnnnnnnnnnnnnnnnnnnnnnnnnnnnnnnnnnnnnnnnnnnnnnnnnnnnnnnnnnnnnnnnnnnnnnnnnnnnnnnnnnnnnnnnnnnnnnnnnnnnnnnnnnnnnnnnnnnnnnnnnnnnnnnnnnnnnnnnnnnnnnnnnnnnnnnnnnnnnnnnnnnnnnnnnnnnnnnnnnnnnnnnnnnnnnnnnnnnnnnnnnnnnnnnnnnnnnnnnnnnnnnnnnnnnnnnnnnnnnnnnnnnnnnnnnnnnnnnnnnnnnnnnnnnnnnnnnnnnnnnnnnnnnnnnnnnnnnnnnnnnnnnnnnnnnnnnnnnnnnnnnnnnnnnnnnnnnnnnnnnnnnnnnnnnnnnnnnnnnnnnnnnnnnnnnnnnnnnnnnnnnnnnnnnnnnnnnnnnnnnnnnnnnnnnnnnnnnnnnnnnnnnnnnnnnnnnnnnnnnnnnnnnnnnnnnnnnnnnnnnnnnnnnnnnnnnnnnnnnnnnnnnnnnnnnnnnnnnnnnnnnnnnnnnnnnnnnnnnnnnnnnnnnnnnnnnnnnnnnnnnnnnnnnnnnnnnnnnnnnnnnnnnnnnnnnnnnnnnnnnnnnnnnnnnnnnnnnnnnnnnnnnnnnnnnnnnnnnnnnnnnnnnnnnnnnnnnnnnnnnnnnnnnnnnnnnnnnnnnnnnnnnnnnnnnnnnnnnnnnnnnnnnnnnnnnnnnnnnnnnnnnnnnnnnnnnnnnnnnnnnnnnnnnnnnnnnnnnnnnnnnnnnnnnnnnnnnnnnnnnnnnnnnnnnnnnnnnnnnnnnnnnnnnnnnnnnnnnnnnnnnnnnnnnnnnnnnnnnnnnnnnnnnnnnnnnnnnnnnnnnnnnnnnnnnnnnnnnnnnnnnnnnnnnnnnnnnnnnnnnnnnnnnnnnnnnnnnnnnnnnnnnnnnnnnnnnnnnnnnnnnnnnnnnnnnnnnnnnnnnnnnnnnnnnnnnnnnnnnnnnnnnnnnnnnnnnnnnnnnnnnnnnnnnnnnnnnnnnnnnnnnnnnnnnnnnnnnnnnnnnnnnnnnnnnnnnnnnnnnnnnnnnnnnnnnnnnnnnnnnnnnnnnnnnnnnnnnnnnnnnnnnnnnnnnnnnnnnnnnnnnnnnnnnnnnnnnnnnnnnnnnnnnnnnnnnnnnnnnnnnnnnnnnnnnnnnnnnnnnnnnnnnnnnnnnnnnnnnnnnnnnnnnnnnnnnnnnnnnnnnnnnnnnnnnnnnnnnnnnnnnnnnnnnnnnnnnnnnnnnnnnnnnnnnnnnnnnnnnnnnnnnnnnnnnnnnnnnnnnnnnnnnnnnnnnnnnnnnnnnnnnnnnnnnnnnnnnnnnnnnnnnnnnnnnnnnnnnnnnnnnnnnnnnnnnnnnnnnnnnnnnnnnnnnnnnnnnnnnnnnnnnnnnnnnnnnnnnnnnnnnnnnnnnnnnnnnnnnnnnnnnnnnnnnnnnnnnnnnnnnnnnnnnnnnnnnnnnnnnnnnnnnnnnnnnnnnnnnnnnnnnnnnnnnnnnnnnnnnnnnnnnnnnnnnnnnnnnnnnnnnnnnnnnnnnnnnnnnnnnnnnnnnnnnnnnnnnnnnnnnnnnnnnnnnnnnnnnnnnnnnnnnnnnnnnnnnnnnnnnnnnnnnnnnnnnnnnnnnnnnnnnnnnnnnnnnnnnnnnnnnnnnnnnnnnnnnnnnnnnnnnnnnnnnnnnnnnnnnnnnnnnnnnnnnnnnnnnnnnnnnnnnnnnnnnnnnnnnnnnnnnnnnnnnnnnnnnnnnnnnnnnnnnnnnnnnnnnnnnnnnnnnnnnnnnnnnnnnnnnnnnnnnnnnnnnnnnnnnnnnnnnnnnnnnnnnnnnnnnnnnnnnnnnnnnnnnnnnnnnnnnnnnnnnnnnnnnnnnnnnnnnnnnnnnnnnnnnnnnnnnnnnnnnnnnnnnnnnnnnnnnnnnnnnnnnnnnnnnnnnnnnnnnnnnnnnnnnnnnnnnnnnnnnnnnnnnnnnnnnnnnnnnnnnnnnnnnnnnnnnnnnnnnnnnnnnnnnnnnnnnnnnnnnnnnnnnnnnnnnnnnnnnnnnnnnnnnnnnnnnnnnnnnnnnnnnnnnnnnnnnnnnnnnnnnnnnnnnnnnnnnnnnnnnnnnnnnnnnnnnnnnnnnnnnnnnnnnnnnnnnnnnnnnnnnnnnnnnnnnnnnnnnnnnnnnnnnnnnnnnnnnnnnnnnnnnnnnnnnnnnnnnnnnnnnnnnnnnnnnnnnnnnnnnnnnnnnnnnnnnnnnnnnnnnnnnnnnnnnnnnnnnnnnnnnnnnnnnnnnnnnnnnnnnnnnnnnnnnnnnnnnnnnnnnnnnnnnnnnnnnnnnnnnnnnnnnnnnnnnnnnnnnnnnnnnnnnnnnnnnnnnnnnnnnnnnnnnnnnnnnnnnnnnnnnnnnnnnnnnnnnnnnnnnnnnnnnnnnnnnnnnnnnnnnnnnnnnnnnnnnnnnnnnnnnnnnnnnnnnnnnnnnnnnnnnnnnnnnnnnnnnnnnnnnnnnnnnnnnnnnnnnnnnnnnnnnnnnnnnnnnnnnnnnnnnnnnnnnnnnnnnnnnnnnnnnnnnnnnnnnnnnnnnnnnnnnnnnnnnnnnnnnnnnnnnnnnnnnnnnnnnnnnnnnnnnnnnnnnnnnnnnnnnnnnnnnnnnnnnnnnnnnnnnnnnnnnnnnnnnnnnnnnnnnnnnnnnnnnnnnnnnnnnnnnnnnnnnnnnnnnnnnnnnnnnnnnnnnnnnnnnnnnnnnnnnnnnnnnnnnnnnnnnnnnnnnnnnnnnnnnnnnnnnnnnnnnnnnnnnnnnnnnnnnnnnnnnnnnnnnnnnnnnnnnnnnnnnnnnnnnnnnnnnnnnnnnnnnnnnnnnnnnnnnnnnnnnnnnnnnnnnnnnnnnnnnnnnnnnnnnnnnnnnnnnnnnnnnnnnnnnnnnnnnnnnnnnnnnnnnnnnnnnnnnnnnnnnnnnnnnnnnnnnnnnnnnnnnnnnnnnnnnnnnnnnnnnnnnnnnnnnnnnnnnnnnnnnnnnnnnnnnnnnnnnnnnnnnnnnnnnnnnnnnnnnnnnnnnnnnnnnnnnnnnnnnnnnnnnnnnnnnnnnnnnnnnnnnnnnnnnnnnnnnnnnnnnnnnnnnnnnnnnnnnnnnnnnnnnnnnnnnnnnnnnnnnnnnnnnnnnnnnnnnnnnnnnnnnnnnnnnnnnnnnnnnnnnnnnnnnnnnnnnnnnnnnnnnnnnnnnnnnnnnnnnnnnnnnnnnnnnnnnnnnnnnnnnnnnnnnnnnnnnnnnnnnnnnnnnnnnnnnnnnnnnnnnnnnnnnnnnnnnnnnnnnnnnnnnnnnnnnnnnnnnnnnnnnnnnnnnnnnnnnnnnnnnnnnnnnnnnnnnnnnnnnnnnnnnnnnnnnnnnnnnnnnnnnnnnnnnnnnnnnnnnnnnnnnnnnnnnnnnnnnnnnnnnnnnnnnnnnnnnnnnnnnnnnnnnnnnnnnnnnnnnnnnnnnnnnnnnnnnnnnnnnnnnnnnnnnnnnnnnnnnnnnnnnnnnnnnnnnnnnnnnnnnnnnnnnnnnnnnnnnnnnnnnnnnnnnnnnnnnnnnnnnnnnnnnnnnnnnnnnnnnnnnnnnnnnnnnnnnnnnnnnnnnnnnnnnnnnnnnnnnnnnnnnnnnnnnnnnnnnnnnnnnnnnnnnnnnnnnnnnnnnnnnnnnnnnnnnnnnnnnnnnnnnnnnnnnnnnnnnnnnnnnnnnnnnnnnnnnnnnnnnnnnnnnnnnnnnnnnnnnnnnnnnnnnnnnnnnnnnnnnnnnnnnnnnnnnnnnnnnnnnnnnnnnnnnnnnnnnnnnnnnnnnnnnnnnnnnnnnnnnnnnnnnnnnnnnnnnnnnnnnnnnnnnnnnnnnnnnnnnnnnnnnnnnnnnnnnnnnnnnnnnnnnnnnnnnnnnnnnnnnnnnnnnnnnnnnnnnnnnnnnnnnnnnnnnnnnnnnnnnnnnnnnnnnnnnnnnnnnnnnnnnnnnnnnnnnnnnnnnnnnnnnnnnnnnnnnnnnnnnnnnnnnnnnnnnnnnnnnnnnnnnnnnnnnnnnnnnnnnnnnnnnnnnnnnnnnnnnnnnnnnnnnnnnnnnnnnnnnnnnnnnnnnnnnnnnnnnnnnnnnnnnnnnnnnnnnnnnnnnnnnnnnnnnnnnnnnnnnnnnnnnnnnnnnnnnnnnnnnnnnnnnnnnnnnnnnnnnnnnnnnnnnnnnnnnnnnnnnnnnnnnnnnnnnnnnnnnnnnnnnnnnnnnnnnnnnnnnnnnnnnnnnnnnnnnnnnnnnnnnnnnnnnnnnnnnnnnnnnnnnnnnnnnnnnnnnnnnnnnnnnnnnnnnnnnnnnnnnnnnnnnnnnnnnnnnnnnnnnnnnnnnnnnnnnnnnnnnnnnnnnnnnnnnnnnnnnnnnnnnnnnnnnnnnnnnnnnnnnnnnnnnnnnnnnnnnnnnnnnnnnnnnnnnnnnnnnnnnnnnnnnnnnnnnnnnnnnnnnnnnnnnnnnnnnnnnnnnnnnnnnnnnnnnnnnnnnnnnnnnnnnnnnnnnnnnnnnnnnnnnnnnnnnnnnnnnnnnnnnnnnnnnnnnnnnnnnnnnnnnnnnnnnnnnnnnnnnnnnnnnnnnnnnnnnnnnnnnnnnnnnnnnnnnnnnnnnnnnnnnnnnnnnnnnnnnnnnnnnnnnnnnnnnnnnnnnnnnnnnnnnnnnnnnnnnnnnnnnnnnnnnnnnnnnnnnnnnnnnnnnnnnnnnnnnnnnnnnnnnnnnnnnnnnnnnnnnnnnnnnnnnnnnnnnnnnnnnnnnnnnnnnnnnnnnnnnnnnnnnnnnnnnnnnnnnnnnnnnnnnnnnnnnnnnnnnnnnnnnnnnnnnnnnnnnnnnnnnnnnnnnnnnnnnnnnnnnnnnnnnnnnnnnnnnnnnnnnnnnnnnnnnnnnnnnnnnnnnnnnnnnnnnnnnnnnnnnnnnnnnnnnnnnnnnnnnnnnnnnnnnnnnnnnnnnnnnnnnnnnnnnnnnnnnnnnnnnnnnnnnnnnnnnnnnnnnnnnnnnnnnnnnnnnnnnnnnnnnnnnnnnnnnnnnnnnnnnnnnnnnnnnnnnnnnnnnnnnnnnnnnnnnnnnnnnnnnnnnnnnnnnnnnnnnnnnnnnnnnnnnnnnnnnnnnnnnnnnnnnnnnnnnnnnnnnnnnnnnnnnnnnnnnnnnnnnnnnnnnnnnnnnnnnnnnnnnnnnnnnnnnnnnnnnnnnnnnnnnnnnnnnnnnnnnnnnnnnnnnnnnnnnnnnnnnnnnnnnnnnnnnnnnnnnnnnnnnnnnnnnnnnnnnnnnnnnnnnnnnnnnnnnnnnnnnnnnnnnnnnnnnnnnnnnnnnnnnnnnnnnnnnnnnnnnnnnnnnnnnnnnnnnnnnnnnnnnnnnnnnnnnnnnnnnnnnnnnnnnnnnnnnnnnnnnnnnnnnnnnnnnnnnnnnnnnnnnnnnnnnnnnnnnnnnnnnnnnnnnnnnnnnnnnnnnnnnnnnnnnnnnnnnnnnnnnnnnnnnnnnnnnnnnnnnnnnnnnnnnnnnnnnnnnnnnnnnnnnnnnnnnnnnnnnnnnnnnnnnnnnnnnnnnnnnnnnnnnnnnnnnnnnnnnnnnnnnnnnnnnnnnnnnnnnnnnnnnnnnnnnnnnnnnnnnnnnnnnnnnnnnnnnnnnnnnnnnnnnnnnnnnnnnnnnnnnnnnnnnnnnnnnnnnnnnnnnnnnnnnnnnnnnnnnnnnnnnnnnnnnnnnnnnnnnnnnnnnnnnnnnnnnnnnnnnnnnnnnnnnnnnnnnnnnnnnnnnnnnnnnnnnnnnnnnnnnnnnnnnnnnnnnnnnnnnnnnnnnnnnnnnnnnnnnnnnnnnnnnnnnnnnnnnnnnnnnnnnnnnnnnnnnnnnnnnnnnnnnnnnnnnnnnnnnnnnnnnnnnnnnnnnnnnnnnnnnnnnnnnnnnnnnnnnnnnnnnnnnnnnnnnnnnnnnnnnnnnnnnnnnnnnnnnnnnnnnnnnnnnnnnnnnnnnnnnnnnnnnnnnnnnnnnnnnnnnnnnnnnnnnnnnnnnnnnnnnnnnnnnnnnnnnnnnnnnnnnnnnnnnnnnnnnnnnnnnnnnnnnnnnnnnnnnnnnnnnnnnnnnnnnnnnnnnnnnnnnnnnnnnnnnnnnnnnnnnnnnnnnnnnnnnnnnnnnnnnnnnnnnnnnnnnnnnnnnnnnnnnnnnnnnnnnnnnnnnnnnnnnnnnnnnnnnnnnnnnnnnnnnnnnnnnnnnnnnnnnnnnnnnnnnnnnnnnnnnnnnnnnnnnnnnnnnnnnnnnnnnnnnnnnnnnnnnnnnnnnnnnnnnnnnnnnnnnnnnnnnnnnnnnnnnnnnnnnnnnnnnnnnnnnnnnnnnnnnnnnnnnnnnnnnnnnnnnnnnnnnnnnnnnnnnnnnnnnnnnnnnnnnnnnnnnnnnnnnnnnnnnnnnnnnnnnnnnnnnnnnnnnnnnnnnnnnnnnnnnnnnnnnnnnnnnnnnnnnnnnnnnnnnnnnnnnnnnnnnnnnnnnnnnnnnnnnnnnnnnnnnnnnnnnnnnnnnnnnnnnnnnnnnnnnnnnnnnnnnnnnnnnnnnnnnnnnnnnnnnnnnnnnnnnnnnnnnnnnnnnnnnnnnnnnnnnnnnnnnnnnnnnnnnnnnnnnnnnnnnnnnnnnnnnnnnnnnnnnnnnnnnnnnnnnnnnnnnnnnnnnnnnnnnnnnnnnnnnnnnnnnnnnnnnnnnnnnnnnnnnnnnnnnnnnnnnnnnnnnnnnnnnnnnnnnnnnnnnnnnnnnnnnnnnnnnnnnnnnnnnnnnnnnnnnnnnnnnnnnnnnnnnnnnnnnnnnnnnnnnnnnnnnnnnnnnnnnnnnnnnnnnnnnnnnnnnnnnnnnnnnnnnnnnnnnnnnnnnnnnnnnnnnnnnnnnnnnnnnnnnnnnnnnnnnnnnnnnnnnnnnnnnnnnnnnnnnnnnnnnnnnnnnnnnnnnnnnnnnnnnnnnnnnnnnnnnnnnnnnnnnnnnnnnnnnnnnnnnnnnnnnnnnnnnnnnnnnnnnnnnnnnnnnnnnnnnnnnnnnnnnnnnnnnnnnnnnnnnnnnnnnnnnnnnnnnnnnnnnnnnnnnnnnnnnnnnnnnnnnnnnnnnnnnnnnnnnnnnnnnnnnnnnnnnnnnnnnnnnnnnnnnnnnnnnnnnnnnnnnnnnnnnnnnnnnnnnnnnnnnnnnnnnnnnnnnnnnnnnnnnnnnnnnnnnnnnnnnnnnnnnnnnnnnnnnnnnnnnnnnnnnnnnnnnnnnnnnnnnnnnnnnnnnnnnnnnnnnnnnnnnnnnnnnnnnnnnnnnnnnnnnnnnnnnnnnnnnnnnnnnnnnnnnnnnnnnnnnnnnnnnnnnnnnnnnnnnnnnnnnnnnnnnnnnnnnnnnnnnnnnnnnnnnnnnnnnnnnnnnnnnnnnnnnnnnnnnnnnnnnnnnnnnnnnnnnnnnnnnnnnnnnnnnnnnnnnnnnnnnnnnnnnnnnnnnnnnnnnnnnnnnnnnnnnnnnnnnnnnnnnnnnnnnnnnnnnnnnnnnnnnnnnnnnnnnnnnnnnnnnnnnnnnnnnnnnnnnnnnnnnnnnnnnnnnnnnnnnnnnnnnnnnnnnnnnnnnnnnnnnnnnnnnnnnnnnnnnnnnnnnnnnnnnnnnnnnnnnnnnnnnnnnnnnnnnnnnnnnnnnnnnnnnnnnnnnnnnnnnnnnnnnnnnnnnnnnnnnnnnnnnnnnnnnnnnnnnnnnnnnnnnnnnnnnnnnnnnnnnnnnnnnnnnnnnnnnnnnnnnnnnnnnnnnnnnnnnnnnnnnnnnnnnnnnnnnnnnnnnnnnnnnnnnnnnnnnnnnnnnnnnnnnnnnnnnnnnnnnnnnnnnnnnnnnnnnnnnnnnnnnnnnnnnnnnnnnnnnnnnnnnnnnnnnnnnnnnnnnnnnnnnnnnnnnnnnnnnnnnnnnnnnnnnnnnnnnnnnnnnnnnnnnnnnnnnnnnnnnnnnnnnnnnnnnnnnnnnnnnnnnnnnnnnnnnnnnnnnnnnnnnnnnnnnnnnnnnnnnnnnnnnnnnnnnnnnnnnnnnnnnnnnnnnnnnnnnnnnnnnnnnnnnnnnnnnnnnnnnnnnnnnnnnnnnnnnnnnnnnnnnnnnnnnnnnnnnnnnnnnnnnnnnnnnnnnnnnnnnnnnnnnnnnnnnnnnnnnnnnnnnnnnnnnnnnnnnnnnnnnnnnnnnnnnnnnnnnnnnnnnnnnnnnnnnnnnnnnnnnnnnnnnnnnnnnnnnnnnnnnnnnnnnnnnnnnnnnnnnnnnnnnnnnnnnnnnnnnnnnnnnnnnnnnnnnnnnnnnnnnnnnnnnnnnnnnnnnnnnnnnnnnnnnnnnnnnnnnnnnnnnnnnnnnnnnnnnnnnnnnnnnnnnnnnnnnnnnnnnnnnnnnnnnnnnnnnnnnnnnnnnnnnnnnnnnnnnnnnnnnnnnnnnnnnnnnnnnnnnnnnnnnnnnnnnnnnnnnnnnnnnnnnnnnnnnnnnnnnnnnnnnnnnnnnnnnnnnnnnnnnnnnnnnnnnnnnnnnnnnnnnnnnnnnnnnnnnnnnnnnnnnnnnnnnnnnnnnnnnnnnnnnnnnnnnnnnnnnnnnnnnnnnnnnnnnnnnnnnnnnnnnnnnnnnnnnnnnnnnnnnnnnnnnnnnnnnnnnnnnnnnnnnnnnnnnnnnnnnnnnnnnnnnnnnnnnnnnnnnnnnnnnnnnnnnnnnnnnnnnnnnnnnnnnnnnnnnnnnnnnnnnnnnnnnnnnnnnnnnnnnnnnnnnnnnnnnnnnnnnnnnnnnnnnnnnnnnnnnnnnnnnnnnnnnnnnnnnnnnnnnnnnnnnnnnnnnnnnnnnnnnnnnnnnnnnnnnnnnnnnnnnnnnnnnnnnnnnnnnnnnnnnnnnnnnnnnnnnnnnnnnnnnnnnnnnnnnnnnnnnnnnnnnnnnnnnnnnnnnnnnnnnnnnnnnnnnnnnnnnnnnnnnnnnnnnnnnnnnnnnnnnnnnnnnnnnnnnnnnnnnnnnnnnnnnnnnnnnnnnnnnnnnnnnnnnnnnnnnnnnnnnnnnnnnnnnnnnnnnnnnnnnnnnnnnnnnnnnnnnnnnnnnnnnnnnnnnnnnnnnnnnnnnnnnnnnnnnnnnnnnnnnnnnnnnnnnnnnnnnnnnnnnnnnnnnnnnnnnnnnnnnnnnnnnnnnnnnnnnnnnnnnnnnnnnnnnnnnnnnnnnnnnnnnnnnnnnnnnnnnnnnnnnnnnnnnnnnnnnnnnnnnnnnnnnnnnnnnnnnnnnnnnnnnnnnnnnnnnnnnnnnnnnnnnnnnnnnnnnnnnnnnnnnnnnnnnnnnnnnnnnnnnnnnnnnnnnnnnnnnnnnnnnnnnnnnnnnnnnnnnnnnnnnnnnnnnnnnnnnnnnnnnnnnnnnnnnnnnnnnnnnnnnnnnnnnnnnnnnnnnnnnnnnnnnnnnnnnnnnnnnnnnnnnnnnnnnnnnnnnnnnnnnnnnnnnnnnnnnnnnnnnnnnnnnnnnnnnnnnnnnnnnnnnnnnnnnnnnnnnnnnnnnnnnnnnnnnnnnnnnnnnnnnnnnnnnnnnnnnnnnnnnnnnnnnnnnnnnnnnnnnnnnnnnnnnnnnnnnnnnnnnnnnnnnnnnnnnnnnnnnnnnnnnnnnnnnnnnnnnnnnnnnnnnnnnnnnnnnnnnnnnnnnnnnnnnnnnnnnnnnnnnnnnnnnnnnnnnnnnnnnnnnnnnnnnnnnnnnnnnnnnnnnnnnnnnnnnnnnnnnnnnnnnnnnnnnnnnnnnnnnnnnnnnnnnnnnnnnnnnnnnnnnnnnnnnnnnnnnnnnnnnnnnnnnnnnnnnnnnnnnnnnnnnnnnnnnnnnnnnnnnnnnnnnnnnnnnnnnnnnnnnnnnnnnnnnnnnnnnnnnnnnnnnnnnnnnnnnnnnnnnnnnnnnnnnnnnnnnnnnnnnnnnnnnnnnnnnnnnnnnnnnnnnnnnnnnnnnnnnnnnnnnnnnnnnnnnnnnnnnnnnnnnnnnnnnnnnnnnnnnnnnnnnnnnnnnnnnnnnnnnnnnnnnnnnnnnnnnnnnnnnnnnnnnnnnnnnnnnnnnnnnnnnnnnnnnnnnnnnnnnnnnnnnnnnnnnnnnnnnnnnnnnnnnnnnnnnnnnnnnnnnnnnnnnnnnnnnnnnnnnnnnnnnnnnnnnnnnnnnnnnnnnnnnnnnnnnnnnnnnnnnnnnnnnnnnnnnnnnnnnnnnnnnnnnnnnnnnnnnnnnnnnnnnnnnnnnnnnnnnnnnnnnnnnnnnnnnnnnnnnnnnnnnnnnnnnnnnnnnnnnnnnnnnnnnnnnnnnnnnnnnnnnnnnnnnnnnnnnnnnnnnnnnnnnnnnnnnnnnnnnnnnnnnnnnnnnnnnnnnnnnnnnnnnnnnnnnnnnnnnnnnnnnnnnnnnnnnnnnnnnnnnnnnnnnnnnnnnnnnnnnnnnnnnnnnnnnnnnnnnnnnnnnnnnnnnnnnnnnnnnnnnnnnnnnnnnnnnnnnnnnnnnnnnnnnnnnnnnnnnnnnnnnnnnnnnnnnnnnnnnnnnnnnnnnnnnnnnnnnnnnnnnnnnnnnnnnnnnnnnnnnnnnnnnnnnnnnnnnnnnnnnnnnnnnnnnnnnnnnnnnnnnnnnnnnnnnnnnnnnnnnnnnnnnnnnnnnnnnnnnnnnnnnnnnnnnnnnnnnnnnnnnnnnnnnnnnnnnnnnnnnnnnnnnnnnnnnnnnnnnnnnnnnnnnnnnnnnnnnnnnnnnnnnnnnnnnnnnnnnnnnnnnnnnnnnnnnnnnnnnnnnnnnnnnnnnnnnnnnnnnnnnnnnnnnnnnnnnnnnnnnnnnnnnnnnnnnnnnnnnnnnnnnnnnnnnnnnnnnnnnnnnnnnnnnnnnnnnnnnnnnnnnnnnnnnnnnnnnnnnnnnnnnnnnnnnnnnnnnnnnnnnnnnnnnnnnnnnnnnnnnnnnnnnnnnnnnnnnnnnnnnnnnnnnnnnnnnnnnnnnnnnnnnnnnnnnnnnnnnnnnnnnnnnnnnnnnnnnnnnnnnnnnnnnnnnnnnnnnnnnnnnnnnnnnnnnnnnnnnnnnnnnnnnnnnnnnnnnnnnnnnnnnnnnnnnnnnnnnnnnnnnnnnnnnnnnnnnnnnnnnnnnnnnnnnnnnnnnnnnnnnnnnnnnnnnnnnnnnnnnnnnnnnnnnnnnnnnnnnnnnnnnnnnnnnnnnnnnnnnnnnnnnnnnnnnnnnnnnnnnnnnnnnnnnnnnnnnnnnnnnnnnnnnnnnnnnnnnnnnnnnnnnnnnnnnnnnnnnnnnnnnnnnnnnnnnnnnnnnnnnnnnnnnnnnnnnnnnnnnnnnnnnnnnnnnnnnnnnnnnnnnnnnnnnnnnnnnnnnnnnnnnnnnnnnnnnnnnnnnnnnnnnnnnnnnnnnnnnnnnnnnnnnnnnnnnnnnnnnnnnnnnnnnnnnnnnnnnnnnnnnnnnnnnnnnnnnnnnnnnnnnnnnnnnnnnnnnnnnnnnnnnnnnnnnnnnnnnnnnnnnnnnnnnnnnnnnnnnnnnnnnnnnnnnnnnnnnnnnnnnnnnnnnnnnnnnnnnnnnnnnnnnnnnnnnnnnnnnnnnnnnnnnnnnnnnnnnnnnnnnnnnnnnnnnnnnnnnnnnnnnnnnnnnnnnnnnnnnnnnnnnnnnnnnnnnnnnnnnnnnnnnnnnnnnnnnnnnnnnnnnnnnnnnnnnnnnnnnnnnnnnnnnnnnnnnnnnnnnnnnnnnnnnnnnnnnnnnnnnnnnnnnnnnnnnnnnnnnnnnnnnnnnnnnnnnnnnnnnnnnnnnnnnnnnnnnnnnnnnnnnnnnnnnnnnnnnnnnnnnnnnnnnnnnnnnnnnnnnnnnnnnnnnnnnnnnnnnnnnnnnnnnnnnnnnnnnnnnnnnnnnnnnnnnnnnnnnnnnnnnnnnnnnnnnnnnnnnnnnnnnnnnnnnnnnnnnnnnnnnnnnnnnnnnnnnnnnnnnnnnnnnnnnnnnnnnnnnnnnnnnnnnnnnnnnnnnnnnnnnnnnnnnnnnnnnnnnnnnnnnnnnnnnnnnnnnnnnnnnnnnnnnnnnnnnnnnnnnnnnnnnnnnnnnnnnnnnnnnnnnnnnnnnnnnnnnnnnnnnnnnnnnnnnnnnnnnnnnnnnnnnnnnnnnnnnnnnnnnnnnnnnnnnnnnnnnnnnnnnnnnnnnnnnnnnnnnnnnnnnnnnnnnnnnnnnnnnnnnnnnnnnnnnnnnnnnnnnnnnnnnnnnnnnnnnnnnnnnnnnnnnnnnnnnnnnnnnnnnnnnnnnnnnnnnnnnnnnnnnnnnnnnnnnnnnnnnnnnnnnnnnnnnnnnnnnnnnnnnnnnnnnnnnnnnnnnnnnnnnnnnnnnnnnnnnnnnnnnnnnnnnnnnnnnnnnnnnnnnnnnnnnnnnnnnnnnnnnnnnnnnnnnnnnnnnnnnnnnnnnnnnnnnnnnnnnnnnnnnnnnnnnnnnnnnnnnnnnnnnnnnnnnnnnnnnnnnnnnnnnnnnnnnnnnnnnnnnnnnnnnnnnnnnnnnnnnnnnnnnnnnnnnnnnnnnnnnnnnnnnnnnnnnnnnnnnnnnnnnnnnnnnnnnnnnnnnnnnnnnnnnnnnnnnnnnnnnnnnnnnnnnnnnnnnnnnnnnnnnnnnnnnnnnnnnnnnnnnnnnnnnnnnnnnnnnnnnnnnnnnnnnnnnnnnnnnnnnnnnnnnnnnnnnnnnnnnnnnnnnnnnnnnnnnnnnnnnnnnnnnnnnnnnnnnnnnnnnnnnnnnnnnnnnnnnnnnnnnnnnnnnnnnnnnnnnnnnnnnnnnnnnnnnnnnnnnnnnnnnnnnnnnnnnnnnnnnnnnnnnnnnnnnnnnnnnnnnnnnnnnnnnnnnnnnnnnnnnnnnnnnnnnnnnnnnnnnnnnnnnnnnnnnnnnnnnnnnnnnnnnnnnnnnnnnnnnnnnnnnnnnnnnnnnnnnnnnnnnnnnnnnnnnnnnnnnnnnnnnnnnnnnnnnnnnnnnnnnnnnnnnnnnnnnnnnnnnnnnnnnnnnnnnnnnnnnnnnnnnnnnnnnnnnnnnnnnnnnnnnnnnnnnnnnnnnnnnnnnnnnnnnnnnnnnnnnnnnnnnnnnnnnnnnnnnnnnnnnnnnnnnnnnnnnnnnnnnnnnnnnnnnnnnnnnnnnnnnnnnnnnnnnnnnnnnnnnnnnnnnnnnnnnnnnnnnnnnnnnnnnnnnnnnnnnnnnnnnnnnnnnnnnnnnnnnnnnnnnnnnnnnnnnnnnnnnnnnnnnnnnnnnnnnnnnnnnnnnnnnnnnnnnnnnnnnnnnnnnnnnnnnnnnnnnnnnnnnnnnnnnnnnnnnnnnnnnnnnnnnnnnnnnnnnnnnnnnnnnnnnnnnnnnnnnnnnnnnnnnnnnnnnnnnnnnnnnnnnnnnnnnnnnnnnnnnnnnnnnnnnnnnnnnnnnnnnnnnnnnnnnnnnnnnnnnnnnnnnnnnnnnnnnnnnnnnnnnnnnnnnnnnnnnnnnnnnnnnnnnnnnnnnnnnnnnnnnnnnnnnnnnnnnnnnnnnnnnnnnnnnnnnnnnnnnnnnnnnnnnnnnnnnnnnnnnnnnnnnnnnnnnnnnnnnnnnnnnnnnnnnnnnnnnnnnnnnnnnnnnnnnnnnnnnnnnnnnnnnnnnnnnnnnnnnnnnnnnnnnnnnnnnnnnnnnnnnnnnnnnnnnnnnnnnnnnnnnnnnnnnnnnnnnnnnnnnnnnnnnnnnnnnnnnnnnnnnnnnnnnnnnnnnnnnnnnnnnnnnnnnnnnnnnnnnnnnnnnnnnnnnnnnnnnnnnnnnnnnnnnnnnnnnnnnnnnnnnnnnnnnnnnnnnnnnnnnnnnnnnnnnnnnnnnnnnnnnnnnnnnnnnnnnnnnnnnnnnnnnnnnnnnnnnnnnnnnnnnnnnnnnnnnnnnnnnnnnnnnnnnnnnnnnnnnnnnnnnnnnnnnnnnnnnnnnnnnnnnnnnnnnnnnnnnnnnnnnnnnnnnnnnnnnnnnnnnnnnnnnnnnnnnnnnnnnnnnnnnnnnnnnnnnnnnnnnnnnnnnnnnnnnnnnnnnnnnnnnnnnnnnnnnnnnnnnnnnnnnnnnnnnnnnnnnnnnnnnnnnnnnnnnnnnnnnnnnnnnnnnnnnnnnnnnnnnnnnnnnnnnnnnnnnnnnnnnnnnnnnnnnnnnnnnnnnnnnnnnnnnnnnnnnnnnnnnnnnnnnnnnnnnnnnnnnnnnnnnnnnnnnnnnnnnnnnnnnnnnnnnnnnnnnnnnnnnnnnnnnnnnnnnnnnnnnnnnnnnnnnnnnnnnnnnnnnnnnnnnnnnnnnnnnnnnnnnnnnnnnnnnnnnnnnnnnnnnnnnnnnnnnnnnnnnnnnnnnnnnnnnnnnnnnnnnnnnnnnnnnnnnnnnnnnnnnnnnnnnnnnnnnnnnnnnnnnnnnnnnnnnnnnnnnnnnnnnnnnnnnnnnnnnnnnnnnnnnnnnnnnnnnnnnnnnnnnnnnnnnnnnnnnnnnnnnnnnnnnnnnnnnnnnnnnnnnnnnnnnnnnnnnnnnnnnnnnnnnnnnnnnnnnnnnnnnnnnnnnnnnnnnnnnnnnnnnnnnnnnnnnnnnnnnnnnnnnnnnnnnnnnnnnnnnnnnnnnnnnnnnnnnnnnnnnnnnnnnnnnnnnnnnnnnnnnnnnnnnnnnnnnnnnnnnnnnnnnnnnnnnnnnnnnnnnnnnnnnnnnnnnnnnnnnnnnnnnnnnnnnnnnnnnnnnnnnnnnnnnnnnnnnnnnnnnnnnnnnnnnnnnnnnnnnnnnnnnnnnnnnnnnnnnnnnnnnnnnnnnnnnnnnnnnnnnnnnnnnnnnnnnnnnnnnnnnnnnnnnnnnnnnnnnnnnnnnnnnnnnnnnnnnnnnnnnnnnnnnnnnnnnnnnnnnnnnnnnnnnnnnnnnnnnnnnnnnnnnnnnnnnnnnnnnnnnnnnnnnnnnnnnnnnnnnnnnnnnnnnnnnnnnnnnnnnnnnnnnnnnnnnnnnnnnnnnnnnnnnnnnnnnnnnnnnnnnnnnnnnnnnnnnnnnnnnnnnnnnnnnnnnnnnnnnnnnnnnnnnnnnnnnnnnnnnnnnnnnnnnnnnnnnnnnnnnnnnnnnnnnnnnnnnnnnnnnnnnnnnnnnnnnnnnnnnnnnnnnnnnnnnnnnnnnnnnnnnnnnnnnnnnnnnnnnnnnnnnnnnnnnnnnnnnnnnnnnnnnnnnnnnnnnnnnnnnnnnnnnnnnnnnnnnnnnnnnnnnnnnnnnnnnnnnnnnnnnnnnnnnnnnnnnnnnnnnnnnnnnnnnnnnnnnnnnnnnnnnnnnnnnnnnnnnnnnnnnnnnnnnnnnnnnnnnnnnnnnnnnnnnnnnnnnnnnnnnnnnnnnnnnnnnnnnnnnnnnnnnnnnnnnnnnnnnnnnnnnnnnnnnnnnnnnnnnnnnnnnnnnnnnnnnnnnnnnnnnnnnnnnnnnnnnnnnnnnnnnnnnnnnnnnnnnnnnnnnnnnnnnnnnnnnnnnnnnnnnnnnnnnnnnnnnnnnnnnnnnnnnnnnnnnnnnnnnnnnnnnnnnnnnnnnnnnnnnnnnnnnnnnnnnnnnnnnnnnnnnnnnnnnnnnnnnnnnnnnnnnnnnnnnnnnnnnnnnnnnnnnnnnnnnnnnnnnnnnnnnnnnnnnnnnnnnnnnnnnnnnnnnnnnnnnnnnnnnnnnnnnnnnnnnnnnnnnnnnnnnnnnnnnnnnnnnnnnnnnnnnnnnnnnnnnnnnnnnnnnnnnnnnnnnnnnnnnnnnnnnnnnnnnnnnnnnnnnnnnnnnnnnnnnnnnnnnnnnnnnnnnnnnnnnnnnnnnnnnnnnnnnnnnnnnnnnnnnnnnnnnnnnnnnnnnnnnnnnnnnnnnnnnnnnnnnnnnnnnnnnnnnnnnnnnnnnnnnnnnnnnnnnnnnnnnnnnnnnnnnnnnnnnnnnnnnnnnnnnnnnnnnnnnnnnnnnnnnnnnnnnnnnnnnnnnnnnnnnnnnnnnnnnnnnnnnnnnnnnnnnnnnnnnnnnnnnnnnnnnnnnnnnnnnnnnnnnnnnnnnnnnnnnnnnnnnnnnnnnnnnnnnnnnnnnnnnnnnnnnnnnnnnnnnnnnnnnnnnnnnnnnnnnnnnnnnnnnnnnnnnnnnnnnnnnnnnnnnnnnnnnnnnnnnnnnnnnnnnnnnnnnnnnnnnnnnnnnnnnnnnnnnnnnnnnnnnnnnnnnnnnnnnnnnnnnnnnnnnnnnnnnnnnnnnnnnnnnnnnnnnnnnnnnnnnnnnnnnnnnnnnnnnnnnnnnnnnnnnnnnnnnnnnnnnnnnnnnnnnnnnnnnnnnnnnnnnnnnnnnnnnnnnnnnnnnnnnnnnnnnnnnnnnnnnnnnnnnnnnnnnnnnnnnnnnnnnnnnnnnnnnnnnnnnnnnnnnnnnnnnnnnnnnnnnnnnnnnnnnnnnnnnnnnnnnnnnnnnnnnnnnnnnnnnnnnnnnnnnnnnnnnnnnnnnnnnnnnnnnnnnnnnnnnnnnnnnnnnnnnnnnnnnnnnnnnnnnnnnnnnnnnnnnnnnnnnnnnnnnnnnnnnnnnnnnnnnnnnnnnnnnnnnnnnnnnnnnnnnnnnnnnnnnnnnnnnnnnnnnnnnnnnnnnnnnnnnnnnnnnnnnnnnnnnnnnnnnnnnnnnnnnnnnnnnnnnnnnnnnnnnnnnnnnnnnnnnnnnnnnnnnnnnnnnnnnnnnnnnnnnnnnnnnnnnnnnnnnnnnnnnnnnnnnnnnnnnnnnnnnnnnnnnnnnnnnnnnnnnnnnnnnnnnnnnnnnnnnnnnnnnnnnnnnnnnnnnnnnnnnnnnnnnnnnnnnnnnnnnnnnnnnnnnnnnnnnnnnnnnnnnnnnnnnnnnnnnnnnnnnnnnnnnnnnnnnnnnnnnnnnnnnnnnnnnnnnnnnnnnnnnnnnnnnnnnnnnnnnnnnnnnnnnnnnnnnnnnnnnnnnnnnnnnnnnnnnnnnnnnnnnnnnnnnnnnnnnnnnnnnnnnnnnnnnnnnnnnnnnnnnnnnnnnnnnnnnnnnnnnnnnnnnnnnnnnnnnnnnnnnnnnnnnnnnnnnnnnnnnnnnnnnnnnnnnnnnnnnnnnnnnnnnnnnnnnnnnnnnnnnnnnnnnnnnnnnnnnnnnnnnnnnnnnnnnnnnnnnnnnnnnnnnnnnnnnnnnnnnnnnnnnnnnnnnnnnnnnnnnnnnnnnnnnnnnnnnnnnnnnnnnnnnnnnnnnnnnnnnnnnnnnnnnnnnnnnnnnnnnnnnnnnnnnnnnnnnnnnnnnnnnnnnnnnnnnnnnnnnnnnnnnnnnnnnnnnnnnnnnnnnnnnnnnnnnnnnnnnnnnnnnnnnnnnnnnnnnnnnnnnnnnnnnnnnnnnnnnnnnnnnnnnnnnnnnnnnnnnnnnnnnnnnnnnnnnnnnnnnnnnnnnnnnnnnnnnnnnnnnnnnnnnnnnnnnnnnnnnnnnnnnnnnnnnnnnnnnnnnnnnnnnnnnnnnnnnnnnnnnnnnnnnnnnnnnnnnnnnnnnnnnnnnnnnnnnnnnnnnnnnnnnnnnnnnnnnnnnnnnnnnnnnnnnnnnnnnnnnnnnnnnnnnnnnnnnnnnnnnnnnnnnnnnnnnnnnnnnnnnnnnnnnnnnnnnnnnnnnnnnnnnnnnnnnnnnnnnnnnnnnnnnnnnnnnnnnnnnnnnnnnnnnnnnnnnnnnnnnnnnnnnnnnnnnnnnnnnnnnnnnnnnnnnnnnnnnnnnnnnnnnnnnnnnnnnnnnnnnnnnnnnnnnnnnnnnnnnnnnnnnnnnnnnnnnnnnnnnnnnnnnnnnnnnnnnnnnnnnnnnnnnnnnnnnnnnnnnnnnnnnnnnnnnnnnnnnnnnnnnnnnnnnnnnnnnnnnnnnnnnnnnnnnnnnnnnnnnnnnnnnnnnnnnnnnnnnnnnnnnnnnnnnnnnnnnnnnnnnnnnnnnnnnnnnnnnnnnnnnnnnnnnnnnnnnnnnnnnnnnnnnnnnnnnnnnnnnnnnnnnnnnnnnnnnnnnnnnnnnnnnnnnnnnnnnnnnnnnnnnnnnnnnnnnnnnnnnnnnnnnnnnnnnnnnnnnnnnnnnnnnnnnnnnnnnnnnnnnnnnnnnnnnnnnnnnnnnnnnnnnnnnnnnnnnnnnnnnnnnnnnnnnnnnnnnnnnnnnnnnnnnnnnnnnnnnnnnnnnnnnnnnnnnnnnnnnnnnnnnnnnnnnnnnnnnnnnnnnnnnnnnnnnnnnnnnnnnnnnnnnnnnnnnnnnnnnnnnnnnnnnnnnnnnnnnnnnnnnnnnnnnnnnnnnnnnnnnnnnnnnnnnnnnnnnnnnnnnnnnnnnnnnnnnnnnnnnnnnnnnnnnnnnnnnnnnnnnnnnnnnnnnnnnnnnnnnnnnnnnnnnnnnnnnnnnnnnnnnnnnnnnnnnnnnnnnnnnnnnnnnnnnnnnnnnnnnnnnnnnnnnnnnnnnnnnnnnnnnnnnnnnnnnnnnnnnnnnnnnnnnnnnnnnnnnnnnnnnnnnnnnnnnnnnnnnnnnnnnnnnnnnnnnnnnnnnnnnnnnnnnnnnnnnnnnnnnnnnnnnnnnnnnnnnnnnnnnnnnnnnnnnnnnnnnnnnnnnnnnnnnnnnnnnnnnnnnnnnnnnnnnnnnnnnnnnnnnnnnnnnnnnnnnnnnnnnnnnnnnnnnnnnnnnnnnnnnnnnnnnnnnnnnnnnnnnnnnnnnnnnnnnnnnnnnnnnnnnnnnnnnnnnnnnnnnnnnnnnnnnnnnnnnnnnnnnnnnnnnnnnnnnnnnnnnnnnnnnnnnnnnnnnnnnnnnnnnnnnnnnnnnnnnnnnnnnnnnnnnnnnnnnnnnnnnnnnnnnnnnnnnnnnnnnnnnnnnnnnnnnnnnnnnnnnnnnnnnnnnnnnnnnnnnnnnnnnnnnnnnnnnnnnnnnnnnnnnnnnnnnnnnnnnnnnnnnnnnnnnnnnnnnnnnnnnnnnnnnnnnnnnnnnnnnnnnnnnnnnnnnnnnnnnnnnnnnnnnnnnnnnnnnnnnnnnnnnnnnnnnnnnnnnnnnnnnnnnnnnnnnnnnnnnnnnnnnnnnnnnnnnnnnnnnnnnnnnnnnnnnnnnnnnnnnnnnnnnnnnnnnnnnnnnnnnnnnnnnnnnnnnnnnnnnnnnnnnnnnnnnnnnnnnnnnnnnnnnnnnnnnnnnnnnnnnnnnnnnnnnnnnnnnnnnnnnnnnnnnnnnnnnnnnnnnnnnnnnnnnnnnnnnnnnnnnnnnnnnnnnnnnnnnnnnnnnnnnnnnnnnnnnnnnnnnnnnnnnnnnnnnnnnnnnnnnnnnnnnnnnnnnnnnnnnnnnnnnnnnnnnnnnnnnnnnnnnnnnnnnnnnnnnnnnnnnnnnnnnnnnnnnnnnnnnnnnnnnnnnnnnnnnnnnnnnnnnnnnnnnnnnnnnnnnnnnnnnnnnnnnnnnnnnnnnnnnnnnnnnnnnnnnnnnnnnnnnnnnnnnnnnnnnnnnnnnnnnnnnnnnnnnnnnnnnnnnnnnnnnnnnnnnnnnnnnnnnnnnnnnnnnnnnnnnnnnnnnnnnnnnnnnnnnnnnnnnnnnnnnnnnnnnnnnnnnnnnnnnnnnnnnnnnnnnnnnnnnnnnnnnnnnnnnnnnnnnnnnnnnnnnnnnnnnnnnnnnnnnnnnnnnnnnnnnnnnnnnnnnnnnnnnnnnnnnnnnnnnnnnnnnnnnnnnnnnnnnnnnnnnnnnnnnnnnnnnnnnnnnnnnnnnnnnnnnnnnnnnnnnnnnnnnnnnnnnnnnnnnnnnnnnnnnnnnnnnnnnnnnnnnnnnnnnnnnnnnnnnnnnnnnnnnnnnnnnnnnnnnnnnnnnnnnnnnnnnnnnnnnnnnnnnnnnnnnnnnnnnnnnnnnnnnnnnnnnnnnnnnnnnnnnnnnnnnnnnnnnnnnnnnnnnnnnnnnnnnnnnnnnnnnnnnnnnnnnnnnnnnnnnnnnnnnnnnnnnnnnnnnnnnnnnnnnnnnnnnnnnnnnnnnnnnnnnnnnnnnnnnnnnnnnnnnnnnnnnnnnnnnnnnnnnnnnnnnnnnnnnnnnnnnnnnnnnnnnnnnnnnnnnnnnnnnnnnnnnnnnnnnnnnnnnnnnnnnnnnnnnnnnnnnnnnnnnnnnnnnnnnnnnnnnnnnnnnnnnnnnnnnnnnnnnnnnnnnnnnnnnnnnnnnnnnnnnnnnnnnnnnnnnnnnnnnnnnnnnnnnnnnnnnnnnnnnnnnnnnnnnnnnnnnnnnnnnnnnnnnnnnnnnnnnnnnnnnnnnnnnnnnnnnnnnnnnnnnnnnnnnnnnnnnnnnnnnnnnnnnnnnnnnnnnnnnnnnnnnnnnnnnnnnnnnnnnnnnnnnnnnnnnnnnnnnnnnnnnnnnnnnnnnnnnnnnnnnnnnnnnnnnnnnnnnnnnnnnnnnnnnnnnnnnnnnnnnnnnnnnnnnnnnnnnnnnnnnnnnnnnnnnnnnnnnnnnnnnnnnnnnnnnnnnnnnnnnnnnnnnnnnnnnnnnnnnnnnnnnnnnnnnnnnnnnnnnnnnnnnnnnnnnnnnnnnnnnnnnnnnnnnnnnnnnnnnnnnnnnnnnnnnnnnnnnnnnnnnnnnnnnnnnnnnnnnnnnnnnnnnnnnnnnnnnnnnnnnnnnnnnnnnnnnnnnnnnnnnnnnnnnnnnnnnnnnnnnnnnnnnnnnnnnnnnnnnnnnnnnnnnnnnnnnnnnnnnnnnnnnnnnnnnnnnnnnnnnnnnnnnnnnnnnnnnnnnnnnnnnnnnnnnnnnnnnnnnnnnnnnnnnnnnnnnnnnnnnnnnnnnnnnnnnnnnnnnnnnnnnnnnnnnnnnnnnnnnnnnnnnnnnnnnnnnnnnnnnnnnnnnnnnnnnnnnnnnnnnnnnnnnnnnnnnnnnnnnnnnnnnnnnnnnnnnnnnnnnnnnnnnnnnnnnnnnnnnnnnnnnnnnnnnnnnnnnnnnnnnnnnnnnnnnnnnnnnnnnnnnnnnnnnnnnnnnnnnnnnnnnnnnnnnnnnnnnnnnnnnnnnnnnnnnnnnnnnnnnnnnnnnnnnnnnnnnnnnnnnnnnnnnnnnnnnnnnnnnnnnnnnnnnnnnnnnnnnnnnnnnnnnnnnnnnnnnnnnnnnnnnnnnnnnnnnnnnnnnnnnnnnnnnnnnnnnnnnnnnnnnnnnnnnnnnnnnnnnnnnnnnnnnnnnnnnnnnnnnnnnnnnnnnnnnnnnnnnnnnnnnnnnnnnnnnnnnnnnnnnnnnnnnnnnnnnnnnnnnnnnnnnnnnnnnnnnnnnnnnnnnnnnnnnnnnnnnnnnnnnnnnnnnnnnnnnnnnnnnnnnnnnnnnnnnnnnnnnnnnnnnnnnnnnnnnnnnnnnnnnnnnnnnnnnnnnnnnnnnnnnnnnnnnnnnnnnnnnnnnnnnnnnnnnnnnnnnnnnnnnnnnnnnnnnnnnnnnnnnnnnnnnnnnnnnnnnnnnnnnnnnnnnnnnnnnnnnnnnnnnnnnnnnnnnnnnnnnnnnnnnnnnnnnnnnnnnnnnnnnnnnnnnnnnnnnnnnnnnnnnnnnnnnnnnnnnnnnnnnnnnnnnnnnnnnnnnnnnnnnnnnnnnnnnnnnnnnnnnnnnnnnnnnnnnnnnnnnnnnnnnnnnnnnnnnnnnnnnnnnnnnnnnnnnnnnnnnnnnnnnnnnnnnnnnnnnnnnnnnnnnnnnnnnnnnnnnnnnnnnnnnnnnnnnnnnnnnnnnnnnnnnnnnnnnnnnnnnnnnnnnnnnnnnnnnnnnnnnnnnnnnnnnnnnnnnnnnnnnnnnnnnnnnnnnnnnnnnnnnnnnnnnnnnnnnnnnnnnnnnnnnnnnnnnnnnnnnnnnnnnnnnnnnnnnnnnnnnnnnnnnnnnnnnnnnnnnnnnnnnnnnnnnnnnnnnnnnnnnnnnnnnnnnnnnnnnnnnnnnnnnnnnnnnnnnnnnnnnnnnnnnnnnnnnnnnnnnnnnnnnnnnnnnnnnnnnnnnnnnnnnnnnnnnnnnnnnnnnnnnnnnnnnnnnnnnnnnnnnnnnnnnnnnnnnnnnnnnnnnnnnnnnnnnnnnnnnnnnnnnnnnnnnnnnnnnnnnnnnnnnnnnnnnnnnnnnnnnnnnnnnnnnnnnnnnnnnnnnnnnnnnnnnnnnnnnnnnnnnnnnnnnnnnnnnnnnnnnnnnnnnnnnnnnnnnnnnnnnnnnnnnnnnnnnnnnnnnnnnnnnnnnnnnnnnnnnnnnnnnnnnnnnnnnnnnnnnnnnnnnnnnnnnnnnnnnnnnnnnnnnnnnnnnnnnnnnnnnnnnnnnnnnnnnnnnnnnnnnnnnnnnnnnnnnnnnnnnnnnnnnnnnnnnnnnnnnnnnnnnnnnnnnnnnnnnnnnnnnnnnnnnnnnnnnnnnnnnnnnnnnnnnnnnnnnnnnnnnnnnnnnnnnnnnnnnnnnnnnnnnnnnnnnnnnnnnnnnnnnnnnnnnnnnnnnnnnnnnnnnnnnnnnnnnnnnnnnnnnnnnnnnnnnnnnnnnnnnnnnnnnnnnnnnnnnnnnnnnnnnnnnnnnnnnnnnnnnnnnnnnnnnnnnnnnnnnnnnnnnnnnnnnnnnnnnnnnnnnnnnnnnnnnnnnnnnnnnnnnnnnnnnnnnnnnnnnnnnnnnnnnnnnnnnnnnnnnnnnnnnnnnnnnnnnnnnnnnnnnnnnnnnnnnnnnnnnnnnnnnnnnnnnnnnnnnnnnnnnnnnnnnnnnnnnnnnnnnnnnnnnnnnnnnnnnnnnnnnnnnnnnnnnnnnnnnnnnnnnnnnnnnnnnnnnnnnnnnnnnnnnnnnnnnnnnnnnnnnnnnnnnnnnnnnnnnnnnnnnnnnnnnnnnnnnnnnnnnnnnnnnnnnnnnnnnnnnnnnnnnnnnnnnnnnnnnnnnnnnnnnnnnnnnnnnnnnnnnnnnnnnnnnnnnnnnnnnnnnnnnnnnnnnnnnnnnnnnnnnnnnnnnnnnnnnnnnnnnnnnnnnnnnnnnnnnnnnnnnnnnnnnnnnnnnnnnnnnnnnnnnnnnnnnnnnnnnnnnnnnnnnnnnnnnnnnnnnnnnnnnnnnnnnnnnnnnnnnnnnnnnnnnnnnnnnnnnnnnnnnnnnnnnnnnnnnnnnnnnnnnnnnnnnnnnnnnnnnnnnnnnnnnnnnnnnnnnnnnnnnnnnnnnnnnnnnnnnnnnnnnnnnnnnnnnnnnnnnnnnnnnnnnnnnnnnnnnnnnnnnnnnnnnnnnnnnnnnnnnnnnnnnnnnnnnnnnnnnnnnnnnnnnnnnnnnnnnnnnnnnnnnnnnnnnnnnnnnnnnnnnnnnnnnnnnnnnnnnnnnnnnnnnnnnnnnnnnnnnnnnnnnnnnnnnnnnnnnnnnnnnnnnnnnnnnnnnnnnnnnnnnnnnnnnnnnnnnnnnnnnnnnnnnnnnnnnnnnnnnnnnnnnnnnnnnnnnnnnnnnnnnnnnnnnnnnnnnnnnnnnnnnnnnnnnnnnnnnnnnnnnnnnnnnnnnnnnnnnnnnnnnnnnnnnnnnnnnnnnnnnnnnnnnnnnnnnnnnnnnnnnnnnnnnnnnnnnnnnnnnnnnnnnnnnnnnnnnnnnnnnnnnnnnnnnnnnnnnnnnnnnnnnnnnnnnnnnnnnnnnnnnnnnnnnnnnnnnnnnnnnnnnnnnnnnnnnnnnnnnnnnnnnnnnnnnnnnnnnnnnnnnnnnnnnnnnnnnnnnnnnnnnnnnnnnnnnnnnnnnnnnnnnnnnnnnnnnnnnnnnnnnnnnnnnnnnnnnnnnnnnnnnnnnnnnnnnnnnnnnnnnnnnnnnnnnnnnnnnnnnnnnnnnnnnnnnnnnnnnnnnnnnnnnnnnnnnnnnnnnnnnnnnnnnnnnnnnnnnnnnnnnnnnnnnnnnnnnnnnnnnnnnnnnnnnnnnnnnnnnnnnnnnnnnnnnnnnnnnnnnnnnnnnnnnnnnnnnnnnnnnnnnnnnnnnnnnnnnnnnnnnnnnnnnnnnnnnnnnnnnnnnnnnnnnnnnnnnnnnnnnnnnnnnnnnnnnnnnnnnnnnnnnnnnnnnnnnnnnnnnnnnnnnnnnnnnnnnnnnnnnnnnnnnnnnnnnnnnnnnnnnnnnnnnnnnnnnnnnnnnnnnnnnnnnnnnnnnnnnnnnnnnnnnnnnnnnnnnnnnnnnnnnnnnnnnnnnnnnnnnnnnnnnnnnnnnnnnnnnnnnnnnnnnnnnnnnnnnnnnnnnnnnnnnnnnnnnnnnnnnnnnnnnnnnnnnnnnnnnnnnnnnnnnnnnnnnnnnnnnnnnnnnnnnnnnnnnnnnnnnnnnnnnnnnnnnnnnnnnnnnnnnnnnnnnnnnnnnnnnnnnnnnnnnnnnnnnnnnnnnnnnnnnnnnnnnnnnnnnnnnnnnnnnnnnnnnnnnnnnnnnnnnnnnnnnnnnnnnnnnnnnnnnnnnnnnnnnnnnnnnnnnnnnnnnnnnnnnnnnnnnnnnnnnnnnnnnnnnnnnnnnnnnnnnnnnnnnnnnnnnnnnnnnnnnnnnnnnnnnnnnnnnnnnnnnnnnnnnnnnnnnnnnnnnnnnnnnnnnnnnnnnnnnnnnnnnnnnnnnnnnnnnnnnnnnnnnnnnnnnnnnnnnnnnnnnnnnnnnnnnnnnnnnnnnnnnnnnnnnnnnnnnnnnnnnnnnnnnnnnnnnnnnnnnnnnnnnnnnnnnnnnnnnnnnnnnnnnnnnnnnnnnnnnnnnnnnnnnnnnnnnnnnnnnnnnnnnnnnnnnnnnnnnnnnnnnnnnnnnnnnnnnnnnnnnnnnnnnnnnnnnnnnnnnnnnnnnnnnnnnnnnnnnnnnnnnnnnnnnnnnnnnnnnnnnnnnnnnnnnnnnnnnnnnnnnnnnnnnnnnnnnnnnnnnnnnnnnnnnnnnnnnnnnnnnnnnnnnnnnnnnnnnnnnnnnnnnnnnnnnnnnnnnnnnnnnnnnnnnnnnnnnnnnnnnnnnnnnnnnnnnnnnnnnnnnnnnnnnnnnnnnnnnnnnnnnnnnnnnnnnnnnnnnnnnnnnnnnnnnnnnnnnnnnnnnnnnnnnnnnnnnnnnnnnnnnnnnnnnnnnnnnnnnnnnnnnnnnnnnnnnnnnnnnnnnnnnnnnnnnnnnnnnnnnnnnnnnnnnnnnnnnnnnnnnnnnnnnnnnnnnnnnnnnnnnnnnnnnnnnnnnnnnnnnnnnnnnnnnnnnnnnnnnnnnnnnnnnnnnnnnnnnnnnnnnnnnnnnnnnnnnnnnnnnnnnnnnnnnnnnnnnnnnnnnnnnnnnnnnnnnnnnnnnnnnnnnnnnnnnnnnnnnnnnnnnnnnnnnnnnnnnnnnnnnnnnnnnnnnnnnnnnnnnnnnnnnnnnnnnnnnnnnnnnnnnnnnnnnnnnnnnnnnnnnnnnnnnnnnnnnnnnnnnnnnnnnnnnnnnnnnnnnnnnnnnnnnnnnnnnnnnnnnnnnnnnnnnnnnnnnnnnnnnnnnnnnnnnnnnnnnnnnnnnnnnnnnnnnnnnnnnnnnnnnnnnnnnnnnnnnnnnnnnnnnnnnnnnnnnnnnnnnnnnnnnnnnnnnnnnnnnnnnnnnnnnnnnnnnnnnnnnnnnnnnnnnnnnnnnnnnnnnnnnnnnnnnnnnnnnnnnnnnnnnnnnnnnnnnnnnnnnnnnnnnnnnnnnnnnnnnnnnnnnnnnnnnnnnnnnnnnnnnnnnnnnnnnnnnnnnnnnnnnnnnnnnnnnnnnnnnnnnnnnnnnnnnnnnnnnnnnnnnnnnnnnnnnnnnnnnnnnnnnnnnnnnnnnnnnnnnnnnnnnnnnnnnnnnnnnnnnnnnnnnnnnnnnnnnnnnnnnnnnnnnnnnnnnnnnnnnnnnnnnnnnnnnnnnnnnnnnnnnnnnnnnnnnnnnnnnnnnnnnnnnnnnnnnnnnnnnnnnnnnnnnnnnnnnnnnnnnnnnnnnnnnnnnnnnnnnnnnnnnnnnnnnnnnnnnnnnnnnnnnnnnnnnnnnnnnnnnnnnnnnnnnnnnnnnnnnnnnnnnnnnnnnnnnnnnnnnnnnnnnnnnnnnnnnnnnnnnnnnnnnnnnnnnnnnnnnnnnnnnnnnnnnnnnnnnnnnnnnnnnnnnnnnnnnnnnnnnnnnnnnnnnnnnnnnnnnnnnnnnnnnnnnnnnnnnnnnnnnnnnnnnnnnnnnnnnnnnnnnnnnnnnnnnnnnnnnnnnnnnnnnnnnnnnnnnnnnnnnnnnnnnnnnnnnnnnnnnnnnnnnnnnnnnnnnnnnnnnnnnnnnnnnnnnnnnnnnnnnnnnnnnnnnnnnnnnnnnnnnnnnnnnnnnnnnnnnnnnnnnnnnnnnnnnnnnnnnnnnnnnnnnnnnnnnnnnnnnnnnnnnnnnnnnnnnnnnnnnnnnnnnnnnnnnnnnnnnnnnnnnnnnnnnnnnnnnnnnnnnnnnnnnnnnnnnnnnnnnnnnnnnnnnnnnnnnnnnnnnnnnnnnnnnnnnnnnnnnnnnnnnnnnnnnnnnnnnnnnnnnnnnnnnnnnnnnnnnnnnnnnnnnnnnnnnnnnnnnnnnnnnnnnnnnnnnnnnnnnnnnnnnnnnnnnnnnnnnnnnnnnnnnnnnnnnnnnnnnnnnnnnnnnnnnnnnnnnnnnnnnnnnnnnnnnnnnnnnnnnnnnnnnnnnnnnnnnnnnnnnnnnnnnnnnnnnnnnnnnnnnnnnnnnnnnnnnnnnnnnnnnnnnnnnnnnnnnnnnnnnnnnnnnnnnnnnnnnnnnnnnnnnnnnnnnnnnnnnnnnnnnnnnnnnnnnnnnnnnnnnnnnnnnnnnnnnnnnnnnnnnnnnnnnnnnnnnnnnnnnnnnnnnnnnnnnnnnnnnnnnnnnnnnnnnnnnnnnnnnnnnnnnnnnnnnnnnnnnnnnnnnnnnnnnnnnnnnnnnnnnnnnnnnnnnnnnnnnnnnnnnnnnnnnnnnnnnnnnnnnnnnnnnnnnnnnnnnnnnnnnnnnnnnnnnnnnnnnnnnnnnnnnnnnnnnnnnnnnnnnnnnnnnnnnnnnnnnnnnnnnnnnnnnnnnnnnnnnnnnnnnnnnnnnnnnnnnnnnnnnnnnnnnnnnnnnnnnnnnnnnnnnnnnnnnnnnnnnnnnnnnnnnnnnnnnnnnnnnnnnnnnnnnnnnnnnnnnnnnnnnnnnnnnnnnnnnnnnnnnnnnnnnnnnnnnnnnnnnnnnnnnnnnnnnnnnnnnnnnnnnnnnnnnnnnnnnnnnnnnnnnnnnnnnnnnnnnnnnnnnnnnnnnnnnnnnnnnnnnnnnnnnnnnnnnnnnnnnnnnnnnnnnnnnnnnnnnnnnnnnnnnnnnnnnnnnnnnnnnnnnnnnnnnnnnnnnnnnnnnnnnnnnnnnnnnnnnnnnnnnnnnnnnnnnnnnnnnnnnnnnnnnnnnnnnnnnnnnnnnnnnnnnnnnnnnnnnnnnnnnnnnnnnnnnnnnnnnnnnnnnnnnnnnnnnnnnnnnnnnnnnnnnnnnnnnnnnnnnnnnnnnnnnnnnnnnnnnnnnnnnnnnnnnnnnnnnnnnnnnnnnnnnnnnnnnnnnnnnnnnnnnnnnnnnnnnnnnnnnnnnnnnnnnnnnnnnnnnnnnnnnnnnnnnnnnnnnnnnnnnnnnnnnnnnnnnnnnnnnnnnnnnnnnnnnnnnnnnnnnnnnnnnnnnnnnnnnnnnnnnnnnnnnnnnnnnnnnnnnnnnnnnnnnnnnnnnnnnnnnnnnnnnnnnnnnnnnnnnnnnnnnnnnnnnnnnnnnnnnnnnnnnnnnnnnnnnnnnnnnnnnnnnnnnnnnnnnnnnnnnnnnnnnnnnnnnnnnnnnnnnnnnnnnnnnnnnnnnnnnnnnnnnnnnnnnnnnnnnnnnnnnnnnnnnnnnnnnnnnnnnnnnnnnnnnnnnnnnnnnnnnnnnnnnnnnnnnnnnnnnnnnnnnnnnnnnnnnnnnnnnnnnnnnnnnnnnnnnnnnnnnnnnnnnnnnnnnnnnnnnnnnnnnnnnnnnnnnnnnnnnnnnnnnnnnnnnnnnnnnnnnnnnnnnnnnnnnnnnnnnnnnnnnnnnnnnnnnnnnnnnnnnnnnnnnnnnnnnnnnnnnnnnnnnnnnnnnnnnnnnnnnnnnnnnnnnnnnnnnnnnnnnnnnnnnnnnnnnnnnnnnnnnnnnnnnnnnnnnnnnnnnnnnnnnnnnnnnnnnnnnnnnnnnnnnnnnnnnnnnnnnnnnnnnnnnnnnnnnnnnnnnnnnnnnnnnnnnnnnnnnnnnnnnnnnnnnnnnnnnnnnnnnnnnnnnnnnnnnnnnnnnnnnnnnnnnnnnnnnnnnnnnnnnnnnnnnnnnnnnnnnnnnnnnnnnnnnnnnnnnnnnnnnnnnnnnnnnnnnnnnnnnnnnnnnnnnnnnnnnnnnnnnnnnnnnnnnnnnnnnnnnnnnnnnnnnnnnnnnnnnnnnnnnnnnnnnnnnnnnnnnnnnnnnnnnnnnnnnnnnnnnnnnnnnnnnnnnnnnnnnnnnnnnnnnnnnnnnnnnnnnnnnnnnnnnnnnnnnnnnnnnnnnnnnnnnnnnnnnnnnnnnnnnnnnnnnnnnnnnnnnnnnnnnnnnnnnnnnnnnnnnnnnnnnnnnnnnnnnnnnnnnnnnnnnnnnnnnnnnnnnnnnnnnnnnnnnnnnnnnnnnnnnnnnnnnnnnnnnnnnnnnnnnnnnnnnnnnnnnnnnnnnnnnnnnnnnnnnnnnnnnnnnnnnnnnnnnnnnnnnnnnnnnnnnnnnnnnnnnnnnnnnnnnnnnnnnnnnnnnnnnnnnnnnnnnnnnnnnnnnnnnnnnnnnnnnnnnnnnnnnnnnnnnnnnnnnnnnnnnnnnnnnnnnnnnnnnnnnnnnnnnnnnnnnnnnnnnnnnnnnnnnnnnnnnnnnnnnnnnnnnnnnnnnnnnnnnnnnnnnnnnnnnnnnnnnnnnnnnnnnnnnnnnnnnnnnnnnnnnnnnnnnnnnnnnnnnnnnnnnnnnnnnnnnnnnnnnnnnnnnnnnnnnnnnnnnnnnnnnnnnnnnnnnnnnnnnnnnnnnnnnnnnnnnnnnnnnnnnnnnnnnnnnnnnnnnnnnnnnnnnnnnnnnnnnnnnnnnnnnnnnnnnnnnnnnnnnnnnnnnnnnnnnnnnnnnnnnnnnnnnnnnnnnnnnnnnnnnnnnnnnnnnnnnnnnnnnnnnnnnnnnnnnnnnnnnnnnnnnnnnnnnnnnnnnnnnnnnnnnnnnnnnnnnnnnnnnnnnnnnnnnnnnnnnnnnnnnnnnnnnnnnnnnnnnnnnnnnnnnnnnnnnnnnnnnnnnnnnnnnnnnnnnnnnnnnnnnnnnnnnnnnnnnnnnnnnnnnnnnnnnnnnnnnnnnnnnnnnnnnnnnnnnnnnnnnnnnnnnnnnnnnnnnnnnnnnnnnnnnnnnnnnnnnnnnnnnnnnnnnnnnnnnnnnnnnnnnnnnnnnnnnnnnnnnnnnnnnnnnnnnnnnnnnnnnnnnnnnnnnnnnnnnnnnnnnnnnnnnnnnnnnnnnnnnnnnnnnnnnnnnnnnnnnnnnnnnnnnnnnnnnnnnnnnnnnnnnnnnnnnnnnnnnnnnnnnnnnnnnnnnnnnnnnnnnnnnnnnnnnnnnnnnnnnnnnnnnnnnnnnnnnnnnnnnnnnnnnnnnnnnnnnnnnnnnnnnnnnnnnnnnnnnnnnnnnnnnnnnnnnnnnnnnnnnnnnnnnnnnnnnnnnnnnnnnnnnnnnnnnnnnnnnnnnnnnnnnnnnnnnnnnnnnnnnnnnnnnnnnnnnnnnnnnnnnnnnnnnnnnnnnnnnnnnnnnnnnnnnnnnnnnnnnnnnnnnnnnnnnnnnnnnnnnnnnnnnnnnnnnnnnnnnnnnnnnnnnnnnnnnnnnnnnnnnnnnnnnnnnnnnnnnnnnnnnnnnnnnnnnnnnnnnnnnnnnnnnnnnnnnnnnnnnnnnnnnnnnnnnnnnnnnnnnnnnnnnnnnnnnnnnnnnnnnnnnnnnnnnnnnnnnnnnnnnnnnnnnnnnnnnnnnnnnnnnnnnnnnnnnnnnnnnnnnnnnnnnnnnnnnnnnnnnnnnnnnnnnnnnnnnnnnnnnnnnnnnnnnnnnnnnnnnnnnnnnnnnnnnnnnnnnnnnnnnnnnnnnnnnnnnnnnnnnnnnnnnnnnnnnnnnnnnnnnnnnnnnnnnnnnnnnnnnnnnnnnnnnnnnnnnnnnnnnnnnnnnnnnnnnnnnnnnnnnnnnnnnnnnnnnnnnnnnnnnnnnnnnnnnnnnnnnnnnnnnnnnnnnnnnnnnnnnnnnnnnnnnnnnnnnnnnnnnnnnnnnnnnnnnnnnnnnnnnnnnnnnnnnnnnnnnnnnnnnnnnnnnnnnnnnnnnnnnnnnnnnnnnnnnnnnnnnnnnnnnnnnnnnnnnnnnnnnnnnnnnnnnnnnnnnnnnnnnnnnnnnnnnnnnnnnnnnnnnnnnnnnnnnnnnnnnnnnnnnnnnnnnnnnnnnnnnnnnnnnnnnnnnnnnnnnnnnnnnnnnnnnnnnnnnnnnnnnnnnnnnnnnnnnnnnnnnnnnnnnnnnnnnnnnnnnnnnnnnnnnnnnnnnnnnnnnnnnnnnnnnnnnnnnnnnnnnnnnnnnnnnnnnnnnnnnnnnnnnnnnnnnnnnnnnnnnnnnnnnnnnnnnnnnnnnnnnnnnnnnnnnnnnnnnnnnnnnnnnnnnnnnnnnnnnnnnnnnnnnnnnnnnnnnnnnnnnnnnnnnnnnnnnnnnnnnnnnnnnnnnnnnnnnnnnnnnnnnnnnnnnnnnnnnnnnnnnnnnnnnnnnnnnnnnnnnnnnnnnnnnnnnnnnnnnnnnnnnnnnnnnnnnnnnnnnnnnnnnnnnnnnnnnnnnnnnnnnnnnnnnnnnnnnnnnnnnnnnnnnnnnnnnnnnnnnnnnnnnnnnnnnnnnnnnnnnnnnnnnnnnnnnnnnnnnnnnnnnnnnnnnnnnnnnnnnnnnnnnnnnnnnnnnnnnnnnnnnnnnnnnnnnnnnnnnnnnnnnnnnnnnnnnnnnnnnnnnnnnnnnnnnnnnnnnnnnnnnnnnnnnnnnnnnnnnnnnnnnnnnnnnnnnnnnnnnnnnnnnnnnnnnnnnnnnnnnnnnnnnnnnnnnnnnnnnnnnnnnnnnnnnnnnnnnnnnnnnnnnnnnnnnnnnnnnnnnnnnnnnnnnnnnnnnnnnnnnnnnnnnnnnnnnnnnnnnnnnnnnnnnnnnnnnnnnnnnnnnnnnnnnnnnnnnnnnnnnnnnnnnnnnnnnnnnnnnnnnnnnnnnnnnnnnnnnnnnnnnnnnnnnnnnnnnnnnnnnnnnnnnnnnnnnnnnnnnnnnnnnnnnnnnnnnnnnnnnnnnnnnnnnnnnnnnnnnnnnnnnnnnnnnnnnnnnnnnnnnnnnnnnnnnnnnnnnnnnnnnnnnnnnnnnnnnnnnnnnnnnnnnnnnnnnnnnnnnnnnnnnnnnnnnnnnnnnnnnnnnnnnnnnnnnnnnnnnnnnnnnnnnnnnnnnnnnnnnnnnnnnnnnnnnnnnnnnnnnnnnnnnnnnnnnnnnnnnnnnnnnnnnnnnnnnnnnnnnnnnnnnnnnnnnnnnnnnnnnnnnnnnnnnnnnnnnnnnnnnnnnnnnnnnnnnnnnnnnnnnnnnnnnnnnnnnnnnnnnnnnnnnnnnnnnnnnnnnnnnnnnnnnnnnnnnnnnnnnnnnnnnnnnnnnnnnnnnnnnnnnnnnnnnnnnnnnnnnnnnnnnnnnnnnnnnnnnnnnnnnnnnnnnnnnnnnnnnnnnnnnnnnnnnnnnnnnnnnnnnnnnnnnnnnnnnnnnnnnnnnnnnnnnnnnnnnnnnnnnnnnnnnnnnnnnnnnnnnnnnnnnnnnnnnnnnnnnnnnnnnnnnnnnnnnnnnnnnnnnnnnnnnnnnnnnnnnnnnnnnnnnnnnnnnnnnnnnnnnnnnnnnnnnnnnnnnnnnnnnnnnnnnnnnnnnnnnnnnnnnnnnnnnnnnnnnnnnnnnnnnnnnnnnnnnnnnnnnnnnnnnnnnnnnnnnnnnnnnnnnnnnnnnnnnnnnnnnnnnnnnnnnnnnnnnnnnnnnnnnnnnnnnnnnnnnnnnnnnnnnnnnnnnnnnnnnnnnnnnnnnnnnnnnnnnnnnnnnnnnnnnnnnnnnnnnnnnnnnnnnnnnnnnnnnnnnnnnnnnnnnnnnnnnnnnnnnnnnnnnnnnnnnnnnnnnnnnnnnnnnnnnnnnnnnnnnnnnnnnnnnnnnnnnnnnnnnnnnnnnnnnnnnnnnnnnnnnnnnnnnnnnnnnnnnnnnnnnnnnnnnnnnnnnnnnnnnnnnnnnnnnnnnnnnnnnnnnnnnnnnnnnnnnnnnnnnnnnnnnnnnnnnnnnnnnnnnnnnnnnnnnnnnnnnnnnnnnnnnnnnnnnnnnnnnnnnnnnnnnnnnnnnnnnnnnnnnnnnnnnnnnnnnnnnnnnnnnnnnnnnnnnnnnnnnnnnnnnnnnnnnnnnnnnnnnnnnnnnnnnnnnnnnnnnnnnnnnnnnnnnnnnnnnnnnnnnnnnnnnnnnnnnnnnnnnnnnnnnnnnnnnnnnnnnnnnnnnnnnnnnnnnnnnnnnnnnnnnnnnnnnnnnnnnnnnnnnnnnnnnnnnnnnnnnnnnnnnnnnnnnnnnnnnnnnnnnnnnnnnnnnnnnnnnnnnnnnnnnnnnnnnnnnnnnnnnnnnnnnnnnnnnnnnnnnnnnnnnnnnnnnnnnnnnnnnnnnnnnnnnnnnnnnnnnnnnnnnnnnnnnnnnnnnnnnnnnnnnnnnnnnnnnnnnnnnnnnnnnnnnnnnnnnnnnnnnnnnnnnnnnnnnnnnnnnnnnnnnnnnnnnnnnnnnnnnnnnnnnnnnnnnnnnnnnnnnnnnnnnnnnnnnnnnnnnnnnnnnnnnnnnnnnnnnnnnnnnnnnnnnnnnnnnnnnnnnnnnnnnnnnnnnnnnnnnnnnnnnnnnnnnnnnnnnnnnnnnnnnnnnnnnnnnnnnnnnnnnnnnnnnnnnnnnnnnnnnnnnnnnnnnnnnnnnnnnnnnnnnnnnnnnnnnnnnnnnnnnnnnnnnnnnnnnnnnnnnnnnnnnnnnnnnnnnnnnnnnnnnnnnnnnnnnnnnnnnnnnnnnnnnnnnnnnnnnnnnnnnnnnnnnnnnnnnnnnnnnnnnnnnnnnnnnnnnnnnnnnnnnnnnnnnnnnnnnnnnnnnnnnnnnnnnnnnnnnnnnnnnnnnnnnnnnnnnnnnnnnnnnnnnnnnnnnnnnnnnnnnnnnnnnnnnnnnnnnnnnnnnnnnnnnnnnnnnnnnnnnnnnnnnnnnnnnnnnnnnnnnnnnnnnnnnnnnnnnnnnnnnnnnnnnnnnnnnnnnnnnnnnnnnnnnnnnnnnnnnnnnnnnnnnnnnnnnnnnnnnnnnnnnnnnnnnnnnnnnnnnnnnnnnnnnnnnnnnnnnnnnnnnnnnnnnnnnnnnnnnnnnnnnnnnnnnnnnnnnnnnnnnnnnnnnnnnnnnnnnnnnnnnnnnnnnnnnnnnnnnnnnnnnnnnnnnnnnnnnnnnnnnnnnnnnnnnnnnnnnnnnnnnnnnnnnnnnnnnnnnnnnnnnnnnnnnnnnnnnnnnnnnnnnnnnnnnnnnnnnnnnnnnnnnnnnnnnnnnnnnnnnnnnnnnnnnnnnnnnnnnnnnnnnnnnnnnnnnnnnnnnnnnnnnnnnnnnnnnnnnnnnnnnnnnnnnnnnnnnnnnnnnnnnnnnnnnnnnnnnnnnnnnnnnnnnnnnnnnnnnnnnnnnnnnnnnnnnnnnnnnnnnnnnnnnnnnnnnnnnnnnnnnnnnnnnnnnnnnnnnnnnnnnnnnnnnnnnnnnnnnnnnnnnnnnnnnnnnnnnnnnnnnnnnnnnnnnnnnnnnnnnnnnnnnnnnnnnnnnnnnnnnnnnnnnnnnnnnnnnnnnnnnnnnnnnnnnnnnnnnnnnnnnnnnnnnnnnnnnnnnnnnnnnnnnnnnnnnnnnnnnnnnnnnnnnnnnnnnnnnnnnnnnnnnnnnnnnnnnnnnnnnnnnnnnnnnnnnnnnnnnnnnnnnnnnnnnnnnnnnnnnnnnnnnnnnnnnnnnnnnnnnnnnnnnnnnnnnnnnnnnnnnnnnnnnnnnnnnnnnnnnnnnnnnnnnnnnnnnnnnnnnnnnnnnnnnnnnnnnnnnnnnnnnnnnnnnnnnnnnnnnnnnnnnnnnnnnnnnnnnnnnnnnnnnnnnnnnnnnnnnnnnnnnnnnnnnnnnnnnnnnnnnnnnnnnnnnnnnnnnnnnnnnnnnnnnnnnnnnnnnnnnnnnnnnnnnnnnnnnnnnnnnnnnnnnnnnnnnnnnnnnnnnnnnnnnnnnnnnnnnnnnnnnnnnnnnnnnnnnnnnnnnnnnnnnnnnnnnnnnnnnnnnnnnnnnnnnnnnnnnnnnnnnnnnnnnnnnnnnnnnnnnnnnnnnnnnnnnnnnnnnnnnnnnnnnnnnnnnnnnnnnnnnnnnnnnnnnnnnnnnnnnnnnnnnnnnnnnnnnnnnnnnnnnnnnnnnnnnnnnnnnnnnnnnnnnnnnnnnnnnnnnnnnnnnnnnnnnnnnnnnnnnnnnnnnnnnnnnnnnnnnnnnnnnnnnnnnnnnnnnnnnnnnnnnnnnnnnnnnnnnnnnnnnnnnnnnnnnnnnnnnnnnnnnnnnnnnnnnnnnnnnnnnnnnnnnnnnnnnnnnnnnnnnnnnnnnnnnnnnnnnnnnnnnnnnnnnnnnnnnnnnnnnnnnnnnnnnnnnnnnnnnnnnnnnnnnnnnnnnnnnnnnnnnnnnnnnnnnnnnnnnnnnnnnnnnnnnnnnnnnnnnnnnnnnnnnnnnnnnnnnnnnnnnnnnnnnnnnnnnnnnnnnnnnnnnnnnnnnnnnnnnnnnnnnnnnnnnnnnnnnnnnnnnnnnnnnnnnnnnnnnnnnnnnnnnnnnnnnnnnnnnnnnnnnnnnnnnnnnnnnnnnnnnnnnnnnnnnnnnnnnnnnnnnnnnnnnnnnnnnnnnnnnnnnnnnnnnnnnnnnnnnnnnnnnnnnnnnnnnnnnnnnnnnnnnnnnnnnnnnnnnnnnnnnnnnnnnnnnnnnnnnnnnnnnnnnnnnnnnnnnnnnnnnnnnnnnnnnnnnnnnnnnnnnnnnnnnnnnnnnnnnnnnnnnnnnnnnnnnnnnnnnnnnnnnnnnnnnnnnnnnnnnnnnnnnnnnnnnnnnnnnnnnnnnnnnnnnnnnnnnnnnnnnnnnnnnnnnnnnnnnnnnnnnnnnnnnnnnnnnnnnnnnnnnnnnnnnnnnnnnnnnnnnnnnnnnnnnnnnnnnnnnnnnnnnnnnnnnnnnnnnnnnnnnnnnnnnnnnnnnnnnnnnnnnnnnnnnnnnnnnnnnnnnnnnnnnnnnnnnnnnnnnnnnnnnnnnnnnnnnnnnnnnnnnnnnnnnnnnnnnnnnnnnnnnnnnnnnnnnnnnnnnnnnnnnnnnnnnnnnnnnnnnnnnnnnnnnnnnnnnnnnnnnnnnnnnnnnnnnnnnnnnnnnnnnnnnnnnnnnnnnnnnnnnnnnnnnnnnnnnnnnnnnnnnnnnnnnnnnnnnnnnnnnnnnnnnnnnnnnnnnnnnnnnnnnnnnnnnnnnnnnnnnnnnnnnnnnnnnnnnnnnnnnnnnnnnnnnnnnnnnnnnnnnnnnnnnnnnnnnnnnnnnnnnnnnnnnnnnnnnnnnnnnnnnnnnnnnnnnnnnnnnnnnnnnnnnnnnnnnnnnnnnnnnnnnnnnnnnnnnnnnnnnnnnnnnnnnnnnnnnnnnnnnnnnnnnnnnnnnnnnnnnnnnnnnnnnnnnnnnnnnnnnnnnnnnnnnnnnnnnnnnnnnnnnnnnnnnnnnnnnnnnnnnnnnnnnnnnnnnnnnnnnnnnnnnnnnnnnnnnnnnnnnnnnnnnnnnnnnnnnnnnnnnnnnnnnnnnnnnnnnnnnnnnnnnnnnnnnnnnnnnnnnnnnnnnnnnnnnnnnnnnnnnnnnnnnnnnnnnnnnnnnnnnnnnnnnnnnnnnnnnnnnnnnnnnnnnnnnnnnnnnnnnnnnnnnnnnnnnnnnnnnnnnnnnnnnnnnnnnnnnnnnnnnnnnnnnnnnnnnnnnnnnnnnnnnnnnnnnnnnnnnnnnnnnnnnnnnnnnnnnnnnnnnnnnnnnnnnnnnnnnnnnnnnnnnnnnnnnnnnnnnnnnnnnnnnnnnnnnnnnnnnnnnnnnnnnnnnnnnnnnnnnnnnnnnnnnnnnnnnnnnnnnnnnnnnnnnnnnnnnnnnnnnnnnnnnnnnnnnnnnnnnnnnnnnnnnnnnnnnnnnnnnnnnnnnnnnnnnnnnnnnnnnnnnnnnnnnnnnnnnnnnnnnnnnnnnnnnnnnnnnnnnnnnnnnnnnnnnnnnnnnnnnnnnnnnnnnnnnnnnnnnnnnnnnnnnnnnnnnnnnnnnnnnnnnnnnnnnnnnnnnnnnnnnnnnnnnnnnnnnnnnnnnnnnnnnnnnnnnnnnnnnnnnnnnnnnnnnnnnnnnnnnnnnnnnnnnnnnnnnnnnnnnnnnnnnnnnnnnnnnnnnnnnnnnnnnnnnnnnnnnnnnnnnnnnnnnnnnnnnnnnnnnnnnnnnnnnnnnnnnnnnnnnnnnnnnnnnnnnnnnnnnnnnnnnnnnnnnnnnnnnnnnnnnnnnnnnnnnnnnnnnnnnnnnnnnnnnnnnnnnnnnnnnnnnnnnnnnnnnnnnnnnnnnnnnnnnnnnnnnnnnnnnnnnnnnnnnnnnnnnnnnnnnnnnnnnnnnnnnnnnnnnnnnnnnnnnnnnnnnnnnnnnnnnnnnnnnnnnnnnnnnnnnnnnnnnnnnnnnnnnnnnnnnnnnnnnnnnnnnnnnnnnnnnnnnnnnnnnnnnnnnnnnnnnnnnnnnnnnnnnnnnnnnnnnnnnnnnnnnnnnnnnnnnnnnnnnnnnnnnnnnnnnnnnnnnnnnnnnnnnnnnnnnnnnnnnnnnnnnnnnnnnnnnnnnnnnnnnnnnnnnnnnnnnnnnnnnnnnnnnnnnnnnnnnnnnnnnnnnnnnnnnnnnnnnnnnnnnnnnnnnnnnnnnnnnnnnnnnnnnnnnnnnnnnnnnnnnnnnnnnnnnnnnnnnnnnnnnnnnnnnnnnnnnnnnnnnnnnnnnnnnnnnnnnnnnnnnnnnnnnnnnnnnnnnnnnnnnnnnnnnnnnnnnnnnnnnnnnnnnnnnnnnnnnnnnnnnnnnnnnnnnnnnnnnnnnnnnnnnnnnnnnnnnnnnnnnnnnnnnnnnnnnnnnnnnnnnnnnnnnnnnnnnnnnnnnnnnnnnnnnnnnnnnnnnnnnnnnnnnnnnnnnnnnnnnnnnnnnnnnnnnnnnnnnnnnnnnnnnnnnnnnnnnnnnnnnnnnnnnnnnnnnnnnnnnnnnnnnnnnnnnnnnnnnnnnnnnnnnnnnnnnnnnnnnnnnnnnnnnnnnnnnnnnnnnnnnnnnnnnnnnnnnnnnnnnnnnnnnnnnnnnnnnnnnnnnnnnnnnnnnnnnnnnnnnnnnnnnnnnnnnnnnnnnnnnnnnnnnnnnnnnnnnnnnnnnnnnnnnnnnnnnnnnnnnnnnnnnnnnnnnnnnnnnnnnnnnnnnnnnnnnnnnnnnnnnnnnnnnnnnnnnnnnnnnnnnnnnnnnnnnnnnnnnnnnnnnnnnnnnnnnnnnnnnnnnnnnnnnnnnnnnnnnnnnnnnnnnnnnnnnnnnnnnnnnnnnnnnnnnnnnnnnnnnnnnnnnnnnnnnnnnnnnnnnnnnnnnnnnnnnnnnnnnnnnnnnnnnnnnnnnnnnnnnnnnnnnnnnnnnnnnnnnnnnnnnnnnnnnnnnnnnnnnnnnnnnnnnnnnnnnnnnnnnnnnnnnnnnnnnnnnnnnnnnnnnnnnnnnnnnnnnnnnnnnnnnnnnnnnnnnnnnnnnnnnnnnnnnnnnnnnnnnnnnnnnnnnnnnnnnnnnnnnnnnnnnnnnnnnnnnnnnnnnnnnnnnnnnnnnnnnnnnnnnnnnnnnnnnnnnnnnnnnnnnnnnnnnnnnnnnnnnnnnnnnnnnnnnnnnnnnnnnnnnnnnnnnnnnnnnnnnnnnnnnnnnnnnnnnnnnnnnnnnnnnnnnnnnnnnnnnnnnnnnnnnnnnnnnnnnnnnnnnnnnnnnnnnnnnnnnnnnnnnnnnnnnnnnnnnnnnnnnnnnnnnnnnnnnnnnnnnnnnnnnnnnnnnnnnnnnnnnnnnnnnnnnnnnnnnnnnnnnnnnnnnnnnnnnnnnnnnnnnnnnnnnnnnnnnnnnnnnnnnnnnnnnnnnnnnnnnnnnnnnnnnnnnnnnnnnnnnnnnnnnnnnnnnnnnnnnnnnnnnnnnnnnnnnnnnnnnnnnnnnnnnnnnnnnnnnnnnnnnnnnnnnnnnnnnnnnnnnnnnnnnnnnnnnnnnnnnnnnnnnnnnnnnnnnnnnnnnnnnnnnnnnnnnnnnnnnnnnnnnnnnnnnnnnnnnnnnnnnnnnnnnnnnnnnnnnnnnnnnnnnnnnnnnnnnnnnnnnnnnnnnnnnnnnnnnnnnnnnnnnnnnnnnnnnnnnnnnnnnnnnnnnnnnnnnnnnnnnnnnnnnnnnnnnnnnnnnnnnnnnnnnnnnnnnnnnnnnnnnnnnnnnnnnnnnnnnnnnnnnnnnnnnnnnnnnnnnnnnnnnnnnnnnnnnnnnnnnnnnnnnnnnnnnnnnnnnnnnnnnnnnnnnnnnnnnnnnnnnnnnnnnnnnnnnnnnnnnnnnnnnnnnnnnnnnnnnnnnnnnnnnnnnnnnnnnnnnnnnnnnnnnnnnnnnnnnnnnnnnnnnnnnnnnnnnnnnnnnnnnnnnnnnnnnnnnnnnnnnnnnnnnnnnnnnnnnnnnnnnnnnnnnnnnnnnnnnnnnnnnnnnnnnnnnnnnnnnnnnnnnnnnnnnnnnnnnnnnnnnnnnnnnnnnnnnnnnnnnnnnnnnnnnnnnnnnnnnnnnnnnnnnnnnnnnnnnnnnnnnnnnnnnnnnnnnnnnnnnnnnnnnnnnnnnnnnnnnnnnnnnnnnnnnnnnnnnnnnnnnnnnnnnnnnnnnnnnnnnnnnnnnnnnnnnnnnnnnnnnnnnnnnnnnnnnnnnnnnnnnnnnnnnnnnnnnnnnnnnnnnnnnnnnnnnnnnnnnnnnnnnnnnnnnnnnnnnnnnnnnnnnnnnnnnnnnnnnnnnnnnnnnnnnnnnnnnnnnnnnnnnnnnnnnnnnnnnnnnnnnnnnnnnnnnnnnnnnnnnnnnnnnnnnnnnnnnnnnnnnnnnnnnnnnnnnnnnnnnnnnnnnnnnnnnnnnnnnnnnnnnnnnnnnnnnnnnnnnnnnnnnnnnnnnnnnnnnnnnnnnnnnnnnnnnnnnnnnnnnnnnnnnnnnnnnnnnnnnnnnnnnnnnnnnnnnnnnnnnnnnnnnnnnnnnnnnnnnnnnnnnnnnnnnnnnnnnnnnnnnnnnnnnnnnnnnnnnnnnnnnnnnnnnnnnnnnnnnnnnnnnnnnnnnnnnnnnnnnnnnnnnnnnnnnnnnnnnnnnnnnnnnnnnnnnnnnnnnnnnnnnnnnnnnnnnnnnnnnnnnnnnnnnnnnnnnnnnnnnnnnnnnnnnnnnnnnnnnnnnnnnnnnnnnnnnnnnnnnnnnnnnnnnnnnnnnnnnnnnnnnnnnnnnnnnnnnnnnnnnnnnnnnnnnnnnnnnnnnnnnnnnnnnnnnnnnnnnnnnnnnnnnnnnnnnnnnnnnnnnnnnnnnnnnnnnnnnnnnnnnnnnnnnnnnnnnnnnnnnnnnnnnnnnnnnnnnnnnnnnnnnnnnnnnnnnnnnnnnnnnnnnnnnnnnnnnnnnnnnnnnnnnnnnnnnnnnnnnnnnnnnnnnnnnnnnnnnnnnnnnnnnnnnnnnnnnnnnnnnnnnnnnnnnnnnnnnnnnnnnnnnnnnnnnnnnnnnnnnnnnnnnnnnnnnnnnnnnnnnnnnnnnnnnnnnnnnnnnnnnnnnnnnnnnnnnnnnnnnnnnnnnnnnnnnnnnnnnnnnnnnnnnnnnnnnnnnnnnnnnnnnnnnnnnnnnnnnnnnnnnnnnnnnnnnnnnnnnnnnnnnnnnnnnnnnnnnnnnnnnnnnnnnnnnnnnnnnnnnnnnnnnnnnnnnnnnnnnnnnnnnnnnnnnnnnnnnnnnnnnnnnnnnnnnnnnnnnnnnnnnnnnnnnnnnnnnnnnnnnnnnnnnnnnnnnnnnnnnnnnnnnnnnnnnnnnnnnnnnnnnnnnnnnnnnnnnnnnnnnnnnnnnnnnnnnnnnnnnnnnnnnnnnnnnnnnnnnnnnnnnnnnnnnnnnnnnnnnnnnnnnnnnnnnnnnnnnnnnnnnnnnnnnnnnnnnnnnnnnnnnnnnnnnnnnnnnnnnnnnnnnnnnnnnnnnnnnnnnnnnnnnnnnnnnnnnnnnnnnnnnnnnnnnnnnnnnnnnnnnnnnnnnnnnnnnnnnnnnnnnnnnnnnnnnnnnnnnnnnnnnnnnnnnnnnnnnnnnnnnnnnnnnnnnnnnnnnnnnnnnnnnnnnnnnnnnnnnnnnnnnnnnnnnnnnnnnnnnnnnnnnnnnnnnnnnnnnnnnnnnnnnnnnnnnnnnnnnnnnnnnnnnnnnnnnnnnnnnnnnnnnnnnnnnnnnnnnnnnnnnnnnnnnnnnnnnnnnnnnnnnnnnnnnnnnnnnnnnnnnnnnnnnnnnnnnnnnnnnnnnnnnnnnnnnnnnnnnnnnnnnnnnnnnnnnnnnnnnnnnnnnnnnnnnnnnnnnnnnnnnnnnnnnnnnnnnnnnnnnnnnnnnnnnnnnnnnnnnnnnnnnnnnnnnnnnnnnnnnnnnnnnnnnnnnnnnnnnnnnnnnnnnnnnnnnnnnnnnnnnnnnnnnnnnnnnnnnnnnnnnnnnnnnnnnnnnnnnnnnnnnnnnnnnnnnnnnnnnnnnnnnnnnnnnnnnnnnnnnnnnnnnnnnnnnnnnnnnnnnnnnnnnnnnnnnnnnnnnnnnnnnnnnnnnnnnnnnnnnnnnnnnnnnnnnnnnnnnnnnnnnnnnnnnnnnnnnnnnnnnnnnnnnnnnnnnnnnnnnnnnnnnnnnnnnnnnnnnnnnnnnnnnnnnnnnnnnnnnnnnnnnnnnnnnnnnnnnnnnnnnnnnnnnnnnnnnnnnnnnnnnnnnnnnnnnnnnnnnnnnnnnnnnnnnnnnnnnnnnnnnnnnnnnnnnnnnnnnnnnnnnnnnnnnnnnnnnnnnnnnnnnnnnnnnnnnnnnnnnnnnnnnnnnnnnnnnnnnnnnnnnnnnnnnnnnnnnnnnnnnnnnnnnnnnnnnnnnnnnnnnnnnnnnnnnnnnnnnnnnnnnnnnnnnnnnnnnnnnnnnnnnnnnnnnnnnnnnnnnnnnnnnnnnnnnnnnnnnnnnnnnnnnnnnnnnnnnnnnnnnnnnnnnnnnnnnnnnnnnnnnnnnnnnnnnnnnnnnnnnnnnnnnnnnnnnnnnnnnnnnnnnnnnnnnnnnnnnnnnnnnnnnnnnnnnnnnnnnnnnnnnnnnnnnnnnnnnnnnnnnnnnnnnnnnnnnnnnnnnnnnnnnnnnnnnnnnnnnnnnnnnnnnnnnnnnnnnnnnnnnnnnnnnnnnnnnnnnnnnnnnnnnnnnnnnnnnnnnnnnnnnnnnnnnnnnnnnnnnnnnnnnnnnnnnnnnnnnnnnnnnnnnnnnnnnnnnnnnnnnnnnnnnnnnnnnnnnnnnnnnnnnnnnnnnnnnnnnnnnnnnnnnnnnnnnnnnnnnnnnnnnnnnnnnnnnnnnnnnnnnnnnnnnnnnnnnnnnnnnnnnnnnnnnnnnnnnnnnnnnnnnnnnnnnnnnnnnnnnnnnnnnnnnnnnnnnnnnnnnnnnnnnnnnnnnnnnnnnnnnnnnnnnnnnnnnnnnnnnnnnnnnnnnnnnnnnnnnnnnnnnnnnnnnnnnnnnnnnnnnnnnnnnnnnnnnnnnnnnnnnnnnnnnnnnnnnnnnnnnnnnnnnnnnnnnnnnnnnnnnnnnnnnnnnnnnnnnnnnnnnnnnnnnnnnnnnnnnnnnnnnnnnnnnnnnnnnnnnnnnnnnnnnnnnnnnnnnnnnnnnnnnnnnnnnnnnnnnnnnnnnnnnnnnnnnnnnnnnnnnnnnnnnnnnnnnnnnnnnnnnnnnnnnnnnnnnnnnnnnnnnnnnnnnnnnnnnnnnnnnnnnnnnnnnnnnnnnnnnnnnnnnnnnnnnnnnnnnnnnnnnnnnnnnnnnnnnnnnnnnnnnnnnnnnnnnnnnnnnnnnnnnnnnnnnnnnnnnnnnnnnnnnnnnnnnnnnnnnnnnnnnnnnnnnnnnnnnnnnnnnnnnnnnnnnnnnnnnnnnnnnnnnnnnnnnnnnnnnnnnnnnnnnnnnnnnnnnnnnnnnnnnnnnnnnnnnnnnnnnnnnnnnnnnnnnnnnnnnnnnnnnnnnnnnnnnnnnnnnnnnnnnnnnnnnnnnnnnnnnnnnnnnnnnnnnnnnnnnnnnnnnnnnnnnnnnnnnnnnnnnnnnnnnnnnnnnnnnnnnnnnnnnnnnnnnnnnnnnnnnnnnnnnnnnnnnnnnnnnnnnnnnnnnnnnnnnnnnnnnnnnnnnnnnnnnnnnnnnnnnnnnnnnnnnnnnnnnnnnnnnnnnnnnnnnnnnnnnnnnnnnnnnnnnnnnnnnnnnnnnnnnnnnnnnnnnnnnnnnnnnnnnnnnnnnnnnnnnnnnnnnnnnnnnnnnnnnnnnnnnnnnnnnnnnnnnnnnnnnnnnnnnnnnnnnnnnnnnnnnnnnnnnnnnnnnnnnnnnnnnnnnnnnnnnnnnnnnnnnnnnnnnnnnnnnnnnnnnnnnnnnnnnnnnnnnnnnnnnnnnnnnnnnnnnnnnnnnnnnnnnnnnnnnnnnnnnnnnnnnnnnnnnnnnnnnnnnnnnnnnnnnnnnnnnnnnnnnnnnnnnnnnnnnnnnnnnnnnnnnnnnnnnnnnnnnnnnnnnnnnnnnnnnnnnnnnnnnnnnnnnnnnnnnnnnnnnnnnnnnnnnnnnnnnnnnnnnnnnnnnnnnnnnnnnnnnnnnnnnnnnnnnnnnnnnnnnnnnnnnnnnnnnnnnnnnnnnnnnnnnnnnnnnnnnnnnnnnnnnnnnnnnnnnnnnnnnnnnnnnnnnnnnnnnnnnnnnnnnnnnnnnnnnnnnnnnnnnnnnnnnnnnnnnnnnnnnnnnnnnnnnnnnnnnnnnnnnnnnnnnnnnnnnnnnnnnnnnnnnnnnnnnnnnnnnnnnnnnnnnnnnnnnnnnnnnnnnnnnnnnnnnnnnnnnnnnnnnnnnnnnnnnnnnnnnnnnnnnnnnnnnnnnnnnnnnnnnnnnnnnnnnnnnnnnnnnnnnnnnnnnnnnnnnnnnnnnnnnnnnnnnnnnnnnnnnnnnnnnnnnnnnnnnnnnnnnnnnnnnnnnnnnnnnnnnnnnnnnnnnnnnnnnnnnnnnnnnnnnnnnnnnnnnnnnnnnnnnnnnnnnnnnnnnnnnnnnnnnnnnnnnnnnnnnnnnnnnnnnnnnnnnnnnnnnnnnnnnnnnnnnnnnnnnnnnnnnnnnnnnnnnnnnnnnnnnnnnnnnnnnnnnnnnnnnnnnnnnnnnnnnnnnnnnnnnnnnnnnnnnnnnnnnnnnnnnnnnnnnnnnnnnnnnnnnnnnnnnnnnnnnnnnnnnnnnnnnnnnnnnnnnnnnnnnnnnnnnnnnnnnnnnnnnnnnnnnnnnnnnnnnnnnnnnnnnnnnnnnnnnnnnnnnnnnnnnnnnnnnnnnnnnnnnnnnnnnnnnnnnnnnnnnnnnnnnnnnnnnnnnnnnnnnnnnnnnnnnnnnnnnnnnnnnnnnnnnnnnnnnnnnnnnnnnnnnnnnnnnnnnnnnnnnnnnnnnnnnnnnnnnnnnnnnnnnnnnnnnnnnnnnnnnnnnnnnnnnnnnnnnnnnnnnnnnnnnnnnnnnnnnnnnnnnnnnnnnnnnnnnnnnnnnnnnnnnnnnnnnnnnnnnnnnnnnnnnnnnnnnnnnnnnnnnnnnnnnnnnnnnnnnnnnnnnnnnnnnnnnnnnnnnnnnnnnnnnnnnnnnnnnnnnnnnnnnnnnnnnnnnnnnnnnnnnnnnnnnnnnnnnnnnnnnnnnnnnnnnnnnnnnnnnnnnnnnnnnnnnnnnnnnnnnnnnnnnnnnnnnnnnnnnnnnnnnnnnnnnnnnnnnnnnnnnnnnnnnnnnnnnnnnnnnnnnnnnnnnnnnnnnnnnnnnnnnnnnnnnnnnnnnnnnnnnnnnnnnnnnnnnnnnnnnnnnnnnnnnnnnnnnnnnnnnnnnnnnnnnnnnnnnnnnnnnnnnnnnnnnnnnnnnnnnnnnnnnnnnnnnnnnnnnnnnnnnnnnnnnnnnnnnnnnnnnnnnnnnnnnnnnnnnnnnnnnnnnnnnnnnnnnnnnnnnnnnnnnnnnnnnnnnnnnnnnnnnnnnnnnnnnnnnnnnnnnnnnnnnnnnnnnnnnnnnnnnnnnnnnnnnnnnnnnnnnnnnnnnnnnnnnnnnnnnnnnnnnnnnnnnnnnnnnnnnnnnnnnnnnnnnnnnnnnnnnnnnnnnnnnnnnnnnnnnnnnnnnnnnnnnnnnnnnnnnnnnnnnnnnnnnnnnnnnnnnnnnnnnnnnnnnnnnnnnnnnnnnnnnnnnnnnnnnnnnnnnnnnnnnnnnnnnnnnnnnnnnnnnnnnnnnnnnnnnnnnnnnnnnnnnnnnnnnnnnnnnnnnnnnnnnnnnnnnnnnnnnnnnnnnnnnnnnnnnnnnnnnnnnnnnnnnnnnnnnnnnnnnnnnnnnnnnnnnnnnnnnnnnnnnnnnnnnnnnnnnnnnnnnnnnnnnnnnnnnnnnnnnnnnnnnnnnnnnnnnnnnnnnnnnnnnnnnnnnnnnnnnnnnnnnnnnnnnnnnnnnnnnnnnnnnnnnnnnnnnnnnnnnnnnnnnnnnnnnnnnnnnnnnnnnnnnnnnnnnnnnnnnnnnnnnnnnnnnnnnnnnnnnnnnnnnnnnnnnnnnnnnnnnnnnnnnnnnnnnnnnnnnnnnnnnnnnnnnnnnnnnnnnnnnnnnnnnnnnnnnnnnnnnnnnnnnnnnnnnnnnnnnnnnnnnnnnnnnnnnnnnnnnnnnnnnnnnnnnnnnnnnnnnnnnnnnnnnnnnnnnnnnnnnnnnnnnnnnnnnnnnnnnnnnnnnnnnnnnnnnnnnnnnnnnnnnnnnnnnnnnnnnnnnnnnnnnnnnnnnnnnnnnnnnnnnnnnnnnnnnnnnnnnnnnnnnnnnnnnnnnnnnnnnnnnnnnnnnnnnnnnnnnnnnnnnnnnnnnnnnnnnnnnnnnnnnnnnnnnnnnnnnnnnnnnnnnnnnnnnnnnnnnnnnnnnnnnnnnnnnnnnnnnnnnnnnnnnnnnnnnnnnnnnnnnnnnnnnnnnnnnnnnnnnnnnnnnnnnnnnnnnnnnnnnnnnnnnnnnnnnnnnnnnnnnnnnnnnnnnnnnnnnnnnnnnnnnnnnnnnnnnnnnnnnnnnnnnnnnnnnnnnnnnnnnnnnnnnnnnnnnnnnnnnnnnnnnnnnnnnnnnnnnnnnnnnnnnnnnnnnnnnnnnnnnnnnnnnnnnnnnnnnnnnnnnnnnnnnnnnnnnnnnnnnnnnnnnnnnnnnnnnnnnnnnnnnnnnnnnnnnnnnnnnnnnnnnnnnnnnnnnnnnnnnnnnnnnnnnnnnnnnnnnnnnnnnnnnnnnnnnnnnnnnnnnnnnnnnnnnnnnnnnnnnnnnnnnnnnnnnnnnnnnnnnnnnnnnnnnnnnnnnnnnnnnnnnnnnnnnnnnnnnnnnnnnnnnnnnnnnnnnnnnnnnnnnnnnnnnnnnnnnnnnnnnnnnnnnnnnnnnnnnnnnnnnnnnnnnnnnnnnnnnnnnnnnnnnnnnnnnnnnnnnnnnnnnnnnnnnnnnnnnnnnnnnnnnnnnnnnnnnnnnnnnnnnnnnnnnnnnnnnnnnnnnnnnnnnnnnnnnnnnnnnnnnnnnnnnnnnnnnnnnnnnnnnnnnnnnnnnnnnnnnnnnnnnnnnnnnnnnnnnnnnnnnnnnnnnnnnnnnnnnnnnnnnnnnnnnnnnnnnnnnnnnnnnnnnnnnnnnnnnnnnnnnnnnnnnnnnnnnnnnnnnnnnnnnnnnnnnnnnnnnnnnnnnnnnnnnnnnnnnnnnnnnnnnnnnnnnnnnnnnnnnnnnnnnnnnnnnnnnnnnnnnnnnnnnnnnnnnnnnnnnnnnnnnnnnnnnnnnnnnnnnnnnnnnnnnnnnnnnnnnnnnnnnnnnnnnnnnnnnnnnnnnnnnnnnnnnnnnnnnnnnnnnnnnnnnnnnnnnnnnnnnnnnnnnnnnnnnnnnnnnnnnnnnnnnnnnnnnnnnnnnnnnnnnnnnnnnnnnnnnnnnnnnnnnnnnnnnnnnnnnnnnnnnnnnnnnnnnnnnnnnnnnnnnnnnnnnnnnnnnnnnnnnnnnnnnnnnnnnnnnnnnnnnnnnnnnnnnnnnnnnnnnnnnnnnnnnnnnnnnnnnnnnnnnnnnnnnnnnnnnnnnnnnnnnnnnnnnnnnnnnnnnnnnnnnnnnnnnnnnnnnnnnnnnnnnnnnnnnnnnnnnnnnnnnnnnnnnnnnnnnnnnnnnnnnnnnnnnnnnnnnnnnnnnnnnnnnnnnnnnnnnnnnnnnnnnnnnnnnnnnnnnnnnnnnnnnnnnnnnnnnnnnnnnnnnnnnnnnnnnnnnnnnnnnnnnnnnnnnnnnnnnnnnnnnnnnnnnnnnnnnnnnnnnnnnnnnnnnnnnnnnnnnnnnnnnnnnnnnnnnnnnnnnnnnnnnnnnnnnnnnnnnnnnnnnnnnnnnnnnnnnnnnnnnnnnnnnnnnnnnnnnnnnnnnnnnnnnnnnnnnnnnnnnnnnnnnnnnnnnnnnnnnnnnnnnnnnnnnnnnnnnnnnnnnnnnnnnnnnnnnnnnnnnnnnnnnnnnnnnnnnnnnnnnnnnnnnnnnnnnnnnnnnnnnnnnnnnnnnnnnnnnnnnnnnnnnnnnnnnnnnnnnnnnnnnnnnnnnnnnnnnnnnnnnnnnnnnnnnnnnnnnnnnnnnnnnnnnnnnnnnnnnnnnnnnnnnnnnnnnnnnnnnnnnnnnnnnnnnnnnnnnnnnnnnnnnnnnnnnnnnnnnnnnnnnnnnnnnnnnnnnnnnnnnnnnnnnnnnnnnnnnnnnnnnnnnnnnnnnnnnnnnnnnnnnnnnnnnnnnnnnnnnnnnnnnnnnnnnnnnnnnnnnnnnnnnnnnnnnnnnnnnnnnnnnnnnnnnnnnnnnnnnnnnnnnnnnnnnnnnnnnnnnnnnnnnnnnnnnnnnnnnnnnnnnnnnnnnnnnnnnnnnnnnnnnnnnnnnnnnnnnnnnnnnnnnnnnnnnnnnnnnnnnnnnnnnnnnnnnnnnnnnnnnnnnnnnnnnnnnnnnnnnnnnnnnnnnnnnnnnnnnnnnnnnnnnnnnnnnnnnnnnnnnnnnnnnnnnnnnnnnnnnnnnnnnnnnnnnnnnnnnnnnnnnnnnnnnnnnnnnnnnnnnnnnnnnnnnnnnnnnnnnnnnnnnnnnnnnnnnnnnnnnnnnnnnnnnnnnnnnnnnnnnnnnnnnnnnnnnnnnnnnnnnnnnnnnnnnnnnnnnnnnnnnnnnnnnnnnnnnnnnnnnnnnnnnnnnnnnnnnnnnnnnnnnnnnnnnnnnnnnnnnnnnnnnnnnnnnnnnnnnnnnnnnnnnnnnnnnnnnnnnnnnnnnnnnnnnnnnnnnnnnnnnnnnnnnnnnnnnnnnnnnnnnnnnnnnnnnnnnnnnnnnnnnnnnnnnnnnnnnnnnnnnnnnnnnnnnnnnnnnnnnnnnnnnnnnnnnnnnnnnnnnnnnnnnnnnnnnnnnnnnnnnnnnnnnnnnnnnnnnnnnnnnnnnnnnnnnnnnnnnnnnnnnnnnnnnnnnnnnnnnnnnnnnnnnnnnnnnnnnnnnnnnnnnnnnnnnnnnnnnnnnnnnnnnnnnnnnnnnnnnnnnnnnnnnnnnnnnnnnnnnnnnnnnnnnnnnnnnnnnnnnnnnnnnnnnnnnnnnnnnnnnnnnnnnnnnnnnnnnnnnnnnnnnnnnnnnnnnnnnnnnnnnnnnnnnnnnnnnnnnnnnnnnnnnnnnnnnnnnnnnnnnnnnnnnnnnnnnnnnnnnnnnnnnnnnnnnnnnnnnnnnnnnnnnnnnnnnnnnnnnnnnnnnnnnnnnnnnnnnnnnnnnnnnnnnnnnnnnnnnnnnnnnnnnnnnnnnnnnnnnnnnnnnnnnnnnnnnnnnnnnnnnnnnnnnnnnnnnnnnnnnnnnnnnnnnnnnnnnnnnnnnnnnnnnnnnnnnnnnnnnnnnnnnnnnnnnnnnnnnnnnnnnnnnnnnnnnnnnnnnnnnnnnnnnnnnnnnnnnnnnnnnnnnnnnnnnnnnnnnnnnnnnnnnnnnnnnnnnnnnnnnnnnnnnnnnnnnnnnnnnnnnnnnnnnnnnnnnnnnnnnnnnnnnnnnnnnnnnnnnnnnnnnnnnnnnnnnnnnnnnnnnnnnnnnnnnnnnnnnnnnnnnnnnnnnnnnnnnnnnnnnnnnnnnnnnnnnnnnnnnnnnnnnnnnnnnnnnnnnnnnnnnnnnnnnnnnnnnnnnnnnnnnnnnnnnnnnnnnnnnnnnnnnnnnnnnnnnnnnnnnnnnnnnnnnnnnnnnnnnnnnnnnnnnnnnnnnnnnnnnnnnnnnnnnnnnnnnnnnnnnnnnnnnnnnnnnnnnnnnnnnnnnnnnnnnnnnnnnnnnnnnnnnnnnnnnnnnnnnnnnnnnnnnnnnnnnnnnnnnnnnnnnnnnnnnnnnnnnnnnnnnnnnnnnnnnnnnnnnnnnnnnnnnnnnnnnnnnnnnnnnnnnnnnnnnnnnnnnnnnnnnnnnnnnnnnnnnnnnnnnnnnnnnnnnnnnnnnnnnnnnnnnnnnnnnnnnnnnnnnnnnnnnnnnnnnnnnnnnnnnnnnnnnnnnnnnnnnnnnnnnnnnnnnnnnnnnnnnnnnnnnnnnnnnnnnnnnnnnnnnnnnnnnnnnnnnnnnnnnnnnnnnnnnnnnnnnnnnnnnnnnnnnnnnnnnnnnnnnnnnnnnnnnnnnnnnnnnnnnnnnnnnnnnnnnnnnnnnnnnnnnnnnnnnnnnnnnnnnnnnnnnnnnnnnnnnnnnnnnnnnnnnnnnnnnnnnnnnnnnnnnnnnnnnnnnnnnnnnnnnnnnnnnnnnnnnnnnnnnnnnnnnnnnnnnnnnnnnnnnnnnnnnnnnnnnnnnnnnnnnnnnnnnnnnnnnnnnnnnnnnnnnnnnnnnnnnnnnnnnnnnnnnnnnnnnnnnnnnnnnnnnnnnnnnnnnnnnnnnnnnnnnnnnnnnnnnnnnnnnnnnnnnnnnnnnnnnnnnnnnnnnnnnnnnnnnnnnnnnnnnnnnnnnnnnnnnnnnnnnnnnnnnnnnnnnnnnnnnnnnnnnnnnnnnnnnnnnnnnnnnnnnnnnnnnnnnnnnnnnnnnnnnnnnnnnnnnnnnnnnnnnnnnnnnnnnnnnnnnnnnnnnnnnnnnnnnnnnnnnnnnnnnnnnnnnnnnnnnnnnnnnnnnnnnnnnnnnnnnnnnnnnnnnnnnnnnnnnnnnnnnnnnnnnnnnnnnnnnnnnnnnnnnnnnnnnnnnnnnnnnnnnnnnnnnnnnnnnnnnnnnnnnnnnnnnnnnnnnnnnnnnnnnnnnnnnnnnnnnnnnnnnnnnnnnnnnnnnnnnnnnnnnnnnnnnnnnnnnnnnnnnnnnnnnnnnnnnnnnnnnnnnnnnnnnnnnnnnnnnnnnnnnnnnnnnnnnnnnnnnnnnnnnnnnnnnnnnnnnnnnnnnnnnnnnnnnnnnnnnnnnnnnnnnnnnnnnnnnnnnnnnnnnnnnnnnnnnnnnnnnnnnnnnnnnnnnnnnnnnnnnnnnnnnnnnnnnnnnnnnnnnnnnnnnnnnnnnnnnnnnnnnnnnnnnnnnnnnnnnnnnnnnnnnnnnnnnnnnnnnnnnnnnnnnnnnnnnnnnnnnnnnnnnnnnnnnnnnnnnnnnnnnnnnnnnnnnnnnnnnnnnnnnnnnnnnnnnnnnnnnnnnnnnnnnnnnnnnnnnnnnnnnnnnnnnnnnnnnnnnnnnnnnnnnnnnnnnnnnnnnnnnnnnnnnnnnnnnnnnnnnnnnnnnnnnnnnnnnnnnnnnnnnnnnnnnnnnnnnnnnnnnnnnnnnnnnnnnnnnnnnnnnnnnnnnnnnnnnnnnnnnnnnnnnnnnnnnnnnnnnnnnnnnnnnnnnnnnnnnnnnnnnnnnnnnnnnnnnnnnnnnnnnnnnnnnnnnnnnnnnnnnnnnnnnnnnnnnnnnnnnnnnnnnnnnnnnnnnnnnnnnnnnnnnnnnnnnnnnnnnnnnnnnnnnnnnnnnnnnnnnnnnnnnnnnnnnnnnnnnnnnnnnnnnnnnnnnnnnnnnnnnnnnnnnnnnnnnnnnnnnnnnnnnnnnnnnnnnnnnnnnnnnnnnnnnnnnnnnnnnnnnnnnnnnnnnnnnnnnnnnnnnnnnnnnnnnnnnnnnnnnnnnnnnnnnnnnnnnnnnnnnnnnnnnnnnnnnnnnnnnnnnnnnnnnnnnnnnnnnnnnnnnnnnnnnnnnnnnnnnnnnnnnnnnnnnnnnnnnnnnnnnnnnnnnnnnnnnnnnnnnnnnnnnnnnnnnnnnnnnnnnnnnnnnnnnnnnnnnnnnnnnnnnnnnnnnnnnnnnnnnnnnnnnnnnnnnnnnnnnnnnnnnnnnnnnnnnnnnnnnnnnnnnnnnnnnnnnnnnnnnnnnnnnnnnnnnnnnnnnnnnnnnnnnnnnnnnnnnnnnnnnnnnnnnnnnnnnnnnnnnnnnnnnnnnnnnnnnnnnnnnnnnnnnnnnnnnnnnnnnnnnnnnnnnnnnnnnnnnnnnnnnnnnnnnnnnnnnnnnnnnnnnnnnnnnnnnnnnnnnnnnnnnnnnnnnnnnnnnnnnnnnnnnnnnnnnnnnnnnnnnnnnnnnnnnnnnnnnnnnnnnnnnnnnnnnnnnnnnnnnnnnnnnnnnnnnnnnnnnnnnnnnnnnnnnnnnnnnnnnnnnnnnnnnnnnnnnnnnnnnnnnnnnnnnnnnnnnnnnnnnnnnnnnnnnnnnnnnnnnnnnnnnnnnnnnnnnnnnnnnnnnnnnnnnnnnnnnnnnnnnnnnnnnnnnnnnnnnnnnnnnnnnnnnnnnnnnnnnnnnnnnnnnnnnnnnnnnnnnnnnnnnnnnnnnnnnnnnnnnnnnnnnnnnnnnnnnnnnnnnnnnnnnnnnnnnnnnnnnnnnnnnnnnnnnnnnnnnnnnnnnnnnnnnnnnnnnnnnnnnnnnnnnnnnnnnnnnnnnnnnnnnnnnnnnnnnnnnnnnnnnnnnnnnnnnnnnnnnnnnnnnnnnnnnnnnnnnnnnnnnnnnnnnnnnnnnnnnnnnnnnnnnnnnnnnnnnnnnnnnnnnnnnnnnnnnnnnnnnnnnnnnnnnnnnnnnnnnnnnnnnnnnnnnnnnnnnnnnnnnnnnnnnnnnnnnnnnnnnnnnnnnnnnnnnnnnnnnnnnnnnnnnnnnnnnnnnnnnnnnnnnnnnnnnnnnnnnnnnnnnnnnnnnnnnnnnnnnnnnnnnnnnnnnnnnnnnnnnnnnnnnnnnnnnnnnnnnnnnnnnnnnnnnnnnnnnnnnnnnnnnnnnnnnnnnnnnnnnnnnnnnnnnnnnnnnnnnnnnnnnnnnnnnnnnnnnnnnnnnnnnnnnnnnnnnnnnnnnnnnnnnnnnnnnnnnnnnnnnnnnnnnnnnnnnnnnnnnnnnnnnnnnnnnnnnnnnnnnnnnnnnnnnnnnnnnnnnnnnnnnnnnnnnnnnnnnnnnnnnnnnnnnnnnnnnnnnnnnnnnnnnnnnnnnnnnnnnnnnnnnnnnnnnnnnnnnnnnnnnnnnnnnnnnnnnnnnnnnnnnnnnnnnnnnnnnnnnnnnnnnnnnnnnnnnnnnnnnnnnnnnnnnnnnnnnnnnnnnnnnnnnnnnnnnnnnnnnnnnnnnnnnnnnnnnnnnnnnnnnnnnnnnnnnnnnnnnnnnnnnnnnnnnnnnnnnnnnnnnnnnnnnnnnnnnnnnnnnnnnnnnnnnnnnnnnnnnnnnnnnnnnnnnnnnnnnnnnnnnnnnnnnnnnnnnnnnnnnnnnnnnnnnnnnnnnnnnnnnnnnnnnnnnnnnnnnnnnnnnnnnnnnnnnnnnnnnnnnnnnnnnnnnnnnnnnnnnnnnnnnnnnnnnnnnnnnnnnnnnnnnnnnnnnnnnnnnnnnnnnnnnnnnnnnnnnnnnnnnnnnnnnnnnnnnnnnnnnnnnnnnnnnnnnnnnnnnnnnnnnnnnnnnnnnnnnnnnnnnnnnnnnnnnnnnnnnnnnnnnnnnnnnnnnnnnnnnnnnnnnnnnnnnnnnnnnnnnnnnnnnnnnnnnnnnnnnnnnnnnnnnnnnnnnnnnnnnnnnnnnnnnnnnnnnnnnnnnnnnnnnnnnnnnnnnnnnnnnnnnnnnnnnnnnnnnnnnnnnnnnnnnnnnnnnnnnnnnnnnnnnnnnnnnnnnnnnnnnnnnnnnnnnnnnnnnnnnnnnnnnnnnnnnnnnnnnnnnnnnnnnnnnnnnnnnnnnnnnnnnnnnnnnnnnnnnnnnnnnnnnnnnnnnnnnnnnnnnnnnnnnnnnnnnnnnnnnnnnnnnnnnnnnnnnnnnnnnnnnnnnnnnnnnnnnnnnnnnnnnnnnnnnnnnnnnnnnnnnnnnnnnnnnnnnnnnnnnnnnnnnnnnnnnnnnnnnnnnnnnnnnnnnnnnnnnnnnnnnnnnnnnnnnnnnnnnnnnnnnnnnnnnnnnnnnnnnnnnnnnnnnnnnnnnnnnnnnnnnnnnnnnnnnnnnnnnnnnnnnnnnnnnnnnnnnnnnnnnnnnnnnnnnnnnnnnnnnnnnnnnnnnnnnnnnnnnnnnnnnnnnnnnnnnnnnnnnnnnnnnnnnnnnnnnnnnnnnnnnnnnnnnnnnnnnnnnnnnnnnnnnnnnnnnnnnnnnnnnnnnnnnnnnnnnnnnnnnnnnnnnnnnnnnnnnnnnnnnnnnnnnnnnnnnnnnnnnnnnnnnnnnnnnnnnnnnnnnnnnnnnnnnnnnnnnnnnnnnnnnnnnnnnnnnnnnnnnnnnnnnnnnnnnnnnnnnnnnnnnnnnnnnnnnnnnnnnnnnnnnnnnnnnnnnnnnnnnnnnnnnnnnnnnnnnnnnnnnnnnnnnnnnnnnnnnnnnnnnnnnnnnnnnnnnnnnnnnnnnnnnnnnnnnnnnnnnnnnnnnnnnnnnnnnnnnnnnnnnnnnnnnnnnnnnnnnnnnnnnnnnnnnnnnnnnnnnnnnnnnnnnnnnnnnnnnnnnnnnnnnnnnnnnnnnnnnnnnnnnnnnnnnnnnnnnnnnnnnnnnnnnnnnnnnnnnnnnnnnnnnnnnnnnnnnnnnnnnnnnnnnnnnnnnnnnnnnnnnnnnnnnnnnnnnnnnnnnnnnnnnnnnnnnnnnnnnnnnnnnnnnnnnnnnnnnnnnnnnnnnnnnnnnnnnnnnnnnnnnnnnnnnnnnnnnnnnnnnnnnnnnnnnnnnnnnnnnnnnnnnnnnnnnnnnnnnnnnnnnnnnnnnnnnnnnnnnnnnnnnnnnnnnnnnnnnnnnnnnnnnnnnnnnnnnnnnnnnnnnnnnnnnnnnnnnnnnnnnnnnnnnnnnnnnnnnnnnnnnnnnnnnnnnnnnnnnnnnnnnnnnnnnnnnnnnnnnnnnnnnnnnnnnnnnnnnnnnnnnnnnnnnnnnnnnnnnnnnnnnnnnnnnnnnnnnnnnnnnnnnnnnnnnnnnnnnnnnnnnnnnnnnnnnnnnnnnnnnnnnnnnnnnnnnnnnnnnnnnnnnnnnnnnnnnnnnnnnnnnnnnnnnnnnnnnnnnnnnnnnnnnnnnnnnnnnnnnnnnnnnnnnnnnnnnnnnnnnnnnnnnnnnnnnnnnnnnnnnnnnnnnnnnnnnnnnnnnnnnnnnnnnnnnnnnnnnnnnnnnnnnnnnnnnnnnnnnnnnnnnnnnnnnnnnnnnnnnnnnnnnnnnnnnnnnnnnnnnnnnnnnnnnnnnnnnnnnnnnnnnnnnnnnnnnnnnnnnnnnnnnnnnnnnnnnnnnnnnnnnnnnnnnnnnnnnnnnnnnnnnnnnnnnnnnnnnnnnnnnnnnnnnnnnnnnnnnnnnnnnnnnnnnnnnnnnnnnnnnnnnnnnnnnnnnnnnnnnnnnnnnnnnnnnnnnnnnnnnnnnnnnnnnnnnnnnnnnnnnnnnnnnnnnnnnnnnnnnnnnnnnnnnnnnnnnnnnnnnnnnnnnnnnnnnnnnnnnnnnnnnnnnnnnnnnnnnnnnnnnnnnnnnnnnnnnnnnnnnnnnnnnnnnnnnnnnnnnnnnnnnnnnnnnnnnnnnnnnnnnnnnnnnnnnnnnnnnnnnnnnnnnnnnnnnnnnnnnnnnnnnnnnnnnnnnnnnnnnnnnnnnnnnnnnnnnnnnnnnnnnnnnnnnnnnnnnnnnnnnnnnnnnnnnnnnnnnnnnnnnnnnnnnnnnnnnnnnnnnnnnnnnnnnnnnnnnnnnnnnnnnnnnnnnnnnnnnnnnnnnnnnnnnnnnnnnnnnnnnnnnnnnnnnnnnnnnnnnnnnnnnnnnnnnnnnnnnnnnnnnnnnnnnnnnnnnnnnnnnnnnnnnnnnnnnnnnnnnnnnnnnnnnnnnnnnnnnnnnnnnnnnnnnnnnnnnnnnnnnnnnnnnnnnnnnnnnnnnnnnnnnnnnnnnnnnnnnnnnnnnnnnnnnnnnnnnnnnnnnnnnnnnnnnnnnnnnnnnnnnnnnnnnnnnnnnnnnnnnnnnnnnnnnnnnnnnnnnnnnnnnnnnnnnnnnnnnnnnnnnnnnnnnnnnnnnnnnnnnnnnnnnnnnnnnnnnnnnnnnnnnnnnnnnnnnnnnnnnnnnnnnnnnnnnnnnnnnnnnnnnnnnnnnnnnnnnnnnnnnnnnnnnnnnnnnnnnnnnnnnnnnnnnnnnnnnnnnnnnnnnnnnnnnnnnnnnnnnnnnnnnnnnnnnnnnnnnnnnnnnnnnnnnnnnnnnnnnnnnnnnnnnnnnnnnnnnnnnnnnnnnnnnnnnnnnnnnnnnnnnnnnnnnnnnnnnnnnnnnnnnnnnnnnnnnnnnnnnnnnnnnnnnnnnnnnnnnnnnnnnnnnnnnnnnnnnnnnnnnnnnnnnnnnnnnnnnnnnnnnnnnnnnnnnnnnnnnnnnnnnnnnnnnnnnnnnnnnnnnnnnnnnnnnnnnnnnnnnnnnnnnnnnnnnnnnnnnnnnnnnnnnnnnnnnnnnnnnnnnnnnnnnnnnnnnnnnnnnnnnnnnnnnnnnnnnnnnnnnnnnnnnnnnnnnnnnnnnnnnnnnnnnnnnnnnnnnnnnnnnnnnnnnnnnnnnnnnnnnnnnnnnnnnnnnnnnnnnnnnnnnnnnnnnnnnnnnnnnnnnnnnnnnnnnnnnnnnnnnnnnnnnnnnnnnnnnnnnnnnnnnnnnnnnnnnnnnnnnnnnnnnnnnnnnnnnnnnnnnnnnnnnnnnnnnnnnnnnnnnnnnnnnnnnnnnnnnnnnnnnnnnnnnnnnnnnnnnnnnnnnnnnnnnnnnnnnnnnnnnnnnnnnnnnnnnnnnnnnnnnnnnnnnnnnnnnnnnnnnnnnnnnnnnnnnnnnnnnnnnnnnnnnnnnnnnnnnnnnnnnnnnnnnnnnnnnnnnnnnnnnnnnnnnnnnnnnnnnnnnnnnnnnnnnnnnnnnnnnnnnnnnnnnnnnnnnnnnnnnnnnnnnnnnnnnnnnnnnnnnnnnnnnnnnnnnnnnnnnnnnnnnnnnnnnnnnnnnnnnnnnnnnnnnnnnnnnnnnnnnnnnnnnnnnnnnnnnnnnnnnnnnnnnnnnnnnnnnnnnnnnnnnnnnnnnnnnnnnnnnnnnnnnnnnnnnnnnnnnnnnnnnnnnnnnnnnnnnnnnnnnnnnnnnnnnnnnnnnnnnnnnnnnnnnnnnnnnnnnnnnnnnnnnnnnnnnnnnnnnnnnnnnnnnnnnnnnnnnnnnnnnnnnnnnnnnnnnnnnnnnnnnnnnnnnnnnnnnnnnnnnnnnnnnnnnnnnnnnnnnnnnnnnnnnnnnnnnnnnnnnnnnnnnnnnnnnnnnnnnnnnnnnnnnnnnnnnnnnnnnnnnnnnnnnnnnnnnnnnnnnnnnnnnnnnnnnnnnnnnnnnnnnnnnnnnnnnnnnnnnnnnnnnnnnnnnnnnnnnnnnnnnnnnnnnnnnnnnnnnnnnnnnnnnnnnnnnnnnnnnnnnnnnnnnnnnnnnnnnnnnnnnnnnnnnnnnnnnnnnnnnnnnnnnnnnnnnnnnnnnnnnnnnnnnnnnnnnnnnnnnnnnnnnnnnnnnnnnnnnnnnnnnnnnnnnnnnnnnnnnnnnnnnnnnnnnnnnnnnnnnnnnnnnnnnnnnnnnnnnnnnnnnnnnnnnnnnnnnnnnnnnnnnnnnnnnnnnnnnnnnnnnnnnnnnnnnnnnnnnnnnnnnnnnnnnnnnnnnnnnnnnnnnnnnnnnnnnnnnnnnnnnnnnnnnnnnnnnnnnnnnnnnnnnnnnnnnnnnnnnnnnnnnnnnnnnnnnnnnnnnnnnnnnnnnnnnnnnnnnnnnnnnnnnnnnnnnnnnnnnnnnnnnnnnnnnnnnnnnnnnnnnnnnnnnnnnnnnnnnnnnnnnnnnnnnnnnnnnnnnnnnnnnnnnnnnnnnnnnnnnnnnnnnnnnnnnnnnnnnnnnnnnnnnnnnnnnnnnnnnnnnnnnnnnnnnnnnnnnnnnnnnnnnnnnnnnnnnnnnnnnnnnnnnnnnnnnnnnnnnnnnnnnnnnnnnnnnnnnnnnnnnnnnnnnnnnnnnnnnnnnnnnnnnnnnnnnnnnnnnnnnnnnnnnnnnnnnnnnnnnnnnnnnnnnnnnnnnnnnnnnnnnnnnnnnnnnnnnnnnnnnnnnnnnnnnnnnnnnnnnnnnnnnnnnnnnnnnnnnnnnnnnnnnnnnnnnnnnnnnnnnnnnnnnnnnnnnnnnnnnnnnnnnnnnnnnnnnnnnnnnnnnnnnnnnnnnnnnnnnnnnnnnnnnnnnnnnnnnnnnnnnnnnnnnnnnnnnnnnnnnnnnnnnnnnnnnnnnnnnnnnnnnnnnnnnnnnnnnnnnnnnnnnnnnnnnnnnnnnnnnnnnnnnnnnnnnnnnnnnnnnnnnnnnnnnnnnnnnnnnnnnnnnnnnnnnnnnnnnnnnnnnnnnnnnnnnnnnnnnnnnnnnnnnnnnnnnnnnnnnnnnnnnnnnnnnnnnnnnnnnnnnnnnnnnnnnnnnnnnnnnnnnnnnnnnnnnnnnnnnnnnnnnnnnnnnnnnnnnnnnnnnnnnnnnnnnnnnnnnnnnnnnnnnnnnnnnnnnnnnnnnnnnnnnnnnnnnnnnnnnnnnnnnnnnnnnnnnnnnnnnnnnnnnnnnnnnnnnnnnnnnnnnnnnnnnnnnnnnnnnnnnnnnnnnnnnnnnnnnnnnnnnnnnnnnnnnnnnnnnnnnnnnnnnnnnnnnnnnnnnnnnnnnnnnnnnnnnnnnnnnnnnnnnnnnnnnnnnnnnnnnnnnnnnnnnnnnnnnnnnnnnnnnnnnnnnnnnnnnnnnnnnnnnnnnnnnnnnnnnnnnnnnnnnnnnnnnnnnnnnnnnnnnnnnnnnnnnnnnnnnnnnnnnnnnnnnnnnnnnnnnnnnnnnnnnnnnnnnnnnnnnnnnnnnnnnnnnnnnnnnnnnnnnnnnnnnnnnnnnnnnnnnnnnnnnnnnnnnnnnnnnnnnnnnnnnnnnnnnnnnnnnnnnnnnnnnnnnnnnnnnnnnnnnnnnnnnnnnnnnnnnnnnnnnnnnnnnnnnnnnnnnnnnnnnnnnnnnnnnnnnnnnnnnnnnnnnnnnnnnnnnnnnnnnnnnnnnnnnnnnnnnnnnnnnnnnnnnnnnnnnnnnnnnnnnnnnnnnnnnnnnnnnnnnnnnnnnnnnnnnnnnnnnnnnnnnnnnnnnnnnnnnnnnnnnnnnnnnnnnnnnnnnnnnnnnnnnnnnnnnnnnnnnnnnnnnnnnnnnnnnnnnnnnnnnnnnnnnnnnnnnnnnnnnnnnnnnnnnnnnnnnnnnnnnnnnnnnnnnnnnnnnnnnnnnnnnnnnnnnnnnnnnnnnnnnnnnnnnnnnnnnnnnnnnnnnnnnnnnnnnnnnnnnnnnnnnnnnnnnnnnnnnnnnnnnnnnnnnnnnnnnnnnnnnnnnnnnnnnnnnnnnnnnnnnnnnnnnnnnnnnnnnnnnnnnnnnnnnnnnnnnnnnnnnnnnnnnnnnnnnnnnnnnnnnnnnnnnnnnnnnnnnnnnnnnnnnnnnnnnnnnnnnnnnnnnnnnnnnnnnnnnnnnnnnnnnnnnnnnnnnnnnnnnnnnnnnnnnnnnnnnnnnnnnnnnnnnnnnnnnnnnnnnnnnnnnnnnnnnnnnnnnnnnnnnnnnnnnnnnnnnnnnnnnnnnnnnnnnnnnnnnnnnnnnnnnnnnnnnnnnnnnnnnnnnnnnnnnnnnnnnnnnnnnnnnnnnnnnnnnnnnnnnnnnnnnnnnnnnnnnnnnnnnnnnnnnnnnnnnnnnnnnnnnnnnnnnnnnnnnnnnnnnnnnnnnnnnnnnnnnnnnnnnnnnnnnnnnnnnnnnnnnnnnnnnnnnnnnnnnnnnnnnnnnnnnnnnnnnnnnnnnnnnnnnnnnnnnnnnnnnnnnnnnnnnnnnnnnnnnnnnnnnnnnnnnnnnnnnnnnnnnnnnnnnnnnnnnnnnnnnnnnnnnnnnnnnnnnnnnnnnnnnnnnnnnnnnnnnnnnnnnnnnnnnnnnnnnnnnnnnnnnnnnnnnnnnnnnnnnnnnnnnnnnnnnnnnnnnnnnnnnnnnnnnnnnnnnnnnnnnnnnnnnnnnnnnnnnnnnnnnnnnnnnnnnnnnnnnnnnnnnnnnnnnnnnnnnnnnnnnnnnnnnnnnnnnnnnnnnnnnnnnnnnnnnnnnnnnnnnnnnnnnnnnnnnnnnnnnnnnnnnnnnnnnnnnnnnnnnnnnnnnnnnnnnnnnnnnnnnnnnnnnnnnnnnnnnnnnnnnnnnnnnnnnnnnnnnnnnnnnnnnnnnnnnnnnnnnnnnnnnnnnnnnnnnnnnnnnnnnnnnnnnnnnnnnnnnnnnnnnnnnnnnnnnnnnnnnnnnnnnnnnnnnnnnnnnnnnnnnnnnnnnnnnnnnnnnnnnnnnnnnnnnnnnnnnnnnnnnnnnnnnnnnnnnnnnnnnnnnnnnnnnnnnnnnnnnnnnnnnnnnnnnnnnnnnnnnnnnnnnnnnnnnnnnnnnnnnnnnnnnnnnnnnnnnnnnnnnnnnnnnnnnnnnnnnnnnnnnnnnnnnnnnnnnnnnnnnnnnnnnnnnnnnnnnnnnnnnnnnnnnnnnnnnnnnnnnnnnnnnnnnnnnnnnnnnnnnnnnnnnnnnnnnnnnnnnnnnnnnnnnnnnnnnnnnnnnnnnnnnnnnnnnnnnnnnnnnnnnnnnnnnnnnnnnnnnnnnnnnnnnnnnnnnnnnnnnnnnnnnnnnnnnnnnnnnnnnnnnnnnnnnnnnnnnnnnnnnnnnnnnnnnnnnnnnnnnnnnnnnnnnnnnnnnnnnnnnnnnnnnnnnnnnnnnnnnnnnnnnnnnnnnnnnnnnnnnnnnnnnnnnnnnnnnnnnnnnnnnnnnnnnnnnnnnnnnnnnnnnnnnnnnnnnnnnnnnnnnnnnnnnnnnnnnnnnnnnnnnnnnnnnnnnnnnnnnnnnnnnnnnnnnnnnnnnnnnnnnnnnnnnnnnnnnnnnnnnnnnnnnnnnnnnnnnnnnnnnnnnnnnnnnnnnnnnnnnnnnnnnnnnnnnnnnnnnnnnnnnnnnnnnnnnnnnnnnnnnnnnnnnnnnnnnnnnnnnnnnnnnnnnnnnnnnnnnnnnnnnnnnnnnnnnnnnnnnnnnnnnnnnnnnnnnnnnnnnnnnnnnnnnnnnnnnnnnnnnnnnnnnnnnnnnnnnnnnnnnnnnnnnnnnnnnnnnnnnnnnnnnnnnnnnnnnnnnnnnnnnnnnnnnnnnnnnnnnnnnnnnnnnnnnnnnnnnnnnnnnnnnnnnnnnnnnnnnnnnnnnnnnnnnnnnnnnnnnnnnnnnnnnnnnnnnnnnnnnnnnnnnnnnnnnnnnnnnnnnnnnnnnnnnnnnnnnnnnnnnnnnnnnnnnnnnnnnnnnnnnnnnnnnnnnnnnnnnnnnnnnnnnnnnnnnnnnnnnnnnnnnnnnnnnnnnnnnnnnnnnnnnnnnnnnnnnnnnnnnnnnnnnnnnnnnnnnnnnnnnnnnnnnnnnnnnnnnnnnnnnnnnnnnnnnnnnnnnnnnnnnnnnnnnnnnnnnnnnnnnnnnnnnnnnnnnnnnnnnnnnnnnnnnnnnnnnnnnnnnnnnnnnnnnnnnnnnnnnnnnnnnnnnnnnnnnnnnnnnnnnnnnnnnnnnnnnnnnnnnnnnnnnnnnnnnnnnnnnnnnnnnnnnnnnnnnnnnnnnnnnnnnnnnnnnnnnnnnnnnnnnnnnnnnnnnnnnnnnnnnnnnnnnnnnnnnnnnnnnnnnnnnnnnnnnnnnnnnnnnnnnnnnnnnnnnnnnnnnnnnnnnnnnnnnnnnnnnnnnnnnnnnnnnnnnnnnnnnnnnnnnnnnnnnnnnnnnnnnnnnnnnnnnnnnnnnnnnnnnnnnnnnnnnnnnnnnnnnnnnnnnnnnnnnnnnnnnnnnnnnnnnnnnnnnnnnnnnnnnnnnnnnnnnnnnnnnnnnnnnnnnnnnnnnnnnnnnnnnnnnnnnnnnnnnnnnnnnnnnnnnnnnnnnnnnnnnnnnnnnnnnnnnnnnnnnnnnnnnnnnnnnnnnnnnnnnnnnnnnnnnnnnnnnnnnnnnnnnnnnnnnnnnnnnnnnnnnnnnnnnnnnnnnnnnnnnnnnnnnnnnnnnnnnnnnnnnnnnnnnnnnnnnnnnnnnnnnnnnnnnnnnnnnnnnnnnnnnnnnnnnnnnnnnnnnnnnnnnnnnnnnnnnnnnnnnnnnnnnnnnnnnnnnnnnnnnnnnnnnnnnnnnnnnnnnnnnnnnnnnnnnnnnnnnnnnnnnnnnnnnnnnnnnnnnnnnnnnnnnnnnnnnnnnnnnnnnnnnnnnnnnnnnnnnnnnnnnnnnnnnnnnnnnnnnnnnnnnnnnnnnnnnnnnnnnnnnnnnnnnnnnnnnnnnnnnnnnnnnnnnnnnnnnnnnnnnnnnnnnnnnnnnnnnnnnnnnnnnnnnnnnnnnnnnnnnnnnnnnnnnnnnnnnnnnnnnnnnnnnnnnnnnnnnnnnnnnnnnnnnnnnnnnnnnnnnnnnnnnnnnnnnnnnnnnnnnnnnnnnnnnnnnnnnnnnnnnnnnnnnnnnnnnnnnnnnnnnnnnnnnnnnnnnnnnnnnnnnnnnnnnnnnnnnnnnnnnnnnnnnnnnnnnnnnnnnnnnnnnnnnnnnnnnnnnnnnnnnnnnnnnnnnnnnnnnnnnnnnnnnnnnnnnnnnnnnnnnnnnnnnnnnnnnnnnnnnnnnnnnnnnnnnnnnnnnnnnnnnnnnnnnnnnnnnnnnnnnnnnnnnnnnnnnnnnnnnnnnnnnnnnnnnnnnnnnnnnnnnnnnnnnnnnnnnnnnnnnnnnnnnnnnnnnnnnnnnnnnnnnnnnnnnnnnnnnnnnnnnnnnnnnnnnnnnnnnnnnnnnnnnnnnnnnnnnnnnnnnnnnnnnnnnnnnnnnnnnnnnnnnnnnnnnnnnnnnnnnnnnnnnnnnnnnnnnnnnnnnnnnnnnnnnnnnnnnnnnnnnnnnnnnnnnnnnnnnnnnnnnnnnnnnnnnnnnnnnnnnnnnnnnnnnnnnnnnnnnnnnnnnnnnnnnnnnnnnnnnnnnnnnnnnnnnnnnnnnnnnnnnnnnnnnnnnnnnnnnnnnnnnnnnnnnnnnnnnnnnnnnnnnnnnnnnnnnnnnnnnnnnnnnnnnnnnnnnnnnnnnnnnnnnnnnnnnnnnnnnnnnnnnnnnnnnnnnnnnnnnnnnnnnnnnnnnnnnnnnnnnnnnnnnnnnnnnnnnnnnnnnnnnnnnnnnnnnnnnnnnnnnnnnnnnnnnnnnnnnnnnnnnnnnnnnnnnnnnnnnnnnnnnnnnnnnnnnnnnnnnnnnnnnnnnnnnnnnnnnnnnnnnnnnnnnnnnnnnnnnnnnnnnnnnnnnnnnnnnnnnnnnnnnnnnnnnnnnnnnnnnnnnnnnnnnnnnnnnnnnnnnnnnnnnnnnnnnnnnnnnnnnnnnnnnnnnnnnnnnnnnnnnnnnnnnnnnnnnnnnnnnnnnnnnnnnnnnnnnnnnnnnnnnnnnnnnnnnnnnnnnnnnnnnnnnnnnnnnnnnnnnnnnnnnnnnnnnnnnnnnnnnnnnnnnnnnnnnnnnnnnnnnnnnnnnnnnnnnnnnnnnnnnnnnnnnnnnnnnnnnnnnnnnnnnnnnnnnnnnnnnnnnnnnnnnnnnnnnnnnnnnnnnnnnnnnnnnnnnnnnnnnnnnnnnnnnnnnnnnnnnnnnnnnnnnnnnnnnnnnnnnnnnnnnnnnnnnnnnnnnnnnnnnnnnnnnnnnnnnnnnnnnnnnnnnnnnnnnnnnnnnnnnnnnnnnnnnnnnnnnnnnnnnnnnnnnnnnnnnnnnnnnnnnnnnnnnnnnnnnnnnnnnnnnnnnnnnnnnnnnnnnnnnnnnnnnnnnnnnnnnnnnnnnnnnnnnnnnnnnnnnnnnnnnnnnnnnnnnnnnnnnnnnnnnnnnnnnnnnnnnnnnnnnnnnnnnnnnnnnnnnnnnnnnnnnnnnnnnnnnnnnnnnnnnnnnnnnnnnnnnnnnnnnnnnnnnnnnnnnnnnnnnnnnnnnnnnnnnnnnnnnnnnnnnnnnnnnnnnnnnnnnnnnnnnnnnnnnnnnnnnnnnnnnnnnnnnnnnnnnnnnnnnnnnnnnnnnnnnnnnnnnnnnnnnnnnnnnnnnnnnnnnnnnnnnnnnnnnnnnnnnnnnnnnnnnnnnnnnnnnnnnnnnnnnnnnnnnnnnnnnnnnnnnnnnnnnnnnnnnnnnnnnnnnnnnnnnnnnnnnnnnnnnnnnnnnnnnnnnnnnnnnnnnnnnnnnnnnnnnnnnnnnnnnnnnnnnnnnnnnnnnnnnnnnnnnnnnnnnnnnnnnnnnnnnnnnnnnnnnnnnnnnnnnnnnnnnnnnnnnnnnnnnnnnnnnnnnnnnnnnnnnnnnnnnnnnnnnnnnnnnnnnnnnnnnnnnnnnnnnnnnnnnnnnnnnnnnnnnnnnnnnnnnnnnnnnnnnnnnnnnnnnnnnnnnnnnnnnnnnnnnnnnnnnnnnnnnnnnnnnnnnnnnnnnnnnnnnnnnnnnnnnnnnnnnnnnnnnnnnnnnnnnnnnnnnnnnnnnnnnnnnnnnnnnnnnnnnnnnnnnnnnnnnnnnnnnnnnnnnnnnnnnnnnnnnnnnnnnnnnnnnnnnnnnnnnnnnnnnnnnnnnnnnnnnnnnnnnnnnnnnnnnnnnnnnnnnnnnnnnnnnnnnnnnnnnnnnnnnnnnnnnnnnnnnnnnnnnnnnnnnnnnnnnnnnnnnnnnnnnnnnnnnnnnnnnnnnnnnnnnnnnnnnnnnnnnnnnnnnnnnnnnnnnnnnnnnnnnnnnnnnnnnnnnnnnnnnnnnnnnnnnnnnnnnnnnnnnnnnnnnnnnnnnnnnnnnnnnnnnnnnnnnnnnnnnnnnnnnnnnnnnnnnnnnnnnnnnnnnnnnnnnnnnnnnnnnnnnnnnnnnnnnnnnnnnnnnnnnnnnnnnnnnnnnnnnnnnnnnnnnnnnnnnnnnnnnnnnnnnnnnnnnnnnnnnnnnnnnnnnnnnnnnnnnnnnnnnnnnnnnnnnnnnnnnnnnnnnnnnnnnnnnnnnnnnnnnnnnnnnnnnnnnnnnnnnnnnnnnnnnnnnnnnnnnnnnnnnnnnnnnnnnnnnnnnnnnnnnnnnnnnnnnnnnnnnnnnnnnnnnnnnnnnnnnnnnnnnnnnnnnnnnnnnnnnnnnnnnnnnnnnnnnnnnnnnnnnnnnnnnnnnnnnnnnnnnnnnnnnnnnnnnnnnnnnnnnnnnnnnnnnnnnnnnnnnnnnnnnnnnnnnnnnnnnnnnnnnnnnnnnnnnnnnnnnnnnnnnnnnnnnnnnnnnnnnnnnnnnnnnnnnnnnnnnnnnnnnnnnnnnnnnnnnnnnnnnnnnnnnnnnnnnnnnnnnnnnnnnnnnnnnnnnnnnnnnnnnnnnnnnnnnnnnnnnnnnnnnnnnnnnnnnnnnnnnnnnnnnnnnnnnnnnnnnnnnnnnnnnnnnnnnnnnnnnnnnnnnnnnnnnnnnnnnnnnnnnnnnnnnnnnnnnnnnnnnnnnnnnnnnnnnnnnnnnnnnnnnnnnnnnnnnnnnnnnnnnnnnnnnnnnnnnnnnnnnnnnnnnnnnnnnnnnnnnnnnnnnnnnnnnnnnnnnnnnnnnnnnnnnnnnnnnnnnnnnnnnnnnnnnnnnnnnnnnnnnnnnnnnnnnnnnnnnnnnnnnnnnnnnnnnnnnnnnnnnnnnnnnnnnnnnnnnnnnnnnnnnnnnnnnnnnnnnnnnnnnnnnnnnnnnnnnnnnnnnnnnnnnnnnnnnnnnnnnnnnnnnnnnnnnnnnnnnnnnnnnnnnnnnnnnnnnnnnnnnnnnnnnnnnnnnnnnnnnnnnnnnnnnnnnnnnnnnnnnnnnnnnnnnnnnnnnnnnnnnnnnnnnnnnnnnnnnnnnnnnnnnnnnnnnnnnnnnnnnnnnnnnnnnnnnnnnnnnnnnnnnnnnnnnnnnnnnnnnnnnnnnnnnnnnnnnnnnnnnnnnnnnnnnnnnnnnnnnnnnnnnnnnnnnnnnnnnnnnnnnnnnnnnnnnnnnnnnnnnnnnnnnnnnnnnnnnnnnnnnnnnnnnnnnnnnnnnnnnnnnnnnnnnnnnnnnnnnnnnnnnnnnnnnnnnnnnnnnnnnnnnnnnnnnnnnnnnnnnnnnnnnnnnnnnnnnnnnnnnnnnnnnnnnnnnnnnnnnnnnnnnnnnnnnnnnnnnnnnnnnnnnnnnnnnnnnnnnnnnnnnnnnnnnnnnnnnnnnnnnnnnnnnnnnnnnnnnnnnnnnnnnnnnnnnnnnnnnnnnnnnnnnnnnnnnnnnnnnnnnnnnnnnnnnnnnnnnnnnnnnnnnnnnnnnnnnnnnnnnnnnnnnnnnnnnnnnnnnnnnnnnnnnnnnnnnnnnnnnnnnnnnnnnnnnnnnnnnnnnnnnnnnnnnnnnnnnnnnnnnnnnnnnnnnnnnnnnnnnnnnnnnnnnnnnnnnnnnnnnnnnnnnnnnnnnnnnnnnnnnnnnnnnnnnnnnnnnnnnnnnnnnnnnnnnnnnnnnnnnnnnnnnnnnnnnnnnnnnnnnnnnnnnnnnnnnnnnnnnnnnnnnnnnnnnnnnnnnnnnnnnnnnnnnnnnnnnnnnnnnnnnnnnnnnnnnnnnnnnnnnnnnnnnnnnnnnnnnnnnnnnnnnnnnnnnnnnnnnnnnnnnnnnnnnnnnnnnnnnnnnnnnnnnnnnnnnnnnnnnnnnnnnnnnnnnnnnnnnnnnnnnnnnnnnnnnnnnnnnnnnnnnnnnnnnnnnnnnnnnnnnnnnnnnnnnnnnnnnnnnnnnnnnnnnnnnnnnnnnnnnnnnnnnnnnnnnnnnnnnnnnnnnnnnnnnnnnnnnnnnnnnnnnnnnnnnnnnnnnnnnnnnnnnnnnnnnnnnnnnnnnnnnnnnnnnnnnnnnnnnnnnnnnnnnnnnnnnnnnnnnnnnnnnnnnnnnnnnnnnnnnnnnnnnnnnnnnnnnnnnnnnnnnnnnnnnnnnnnnnnnnnnnnnnnnnnnnnnnnnnnnnnnnnnnnnnnnnnnnnnnnnnnnnnnnnnnnnnnnnnnnnnnnnnnnnnnnnnnnnnnnnnnnnnnnnnnnnnnnnnnnnnnnnnnnnnnnnnnnnnnnnnnnnnnnnnnnnnnnnnnnnnnnnnnnnnnnnnnnnnnnnnnnnnnnnnnnnnnnnnnnnnnnnnnnnnnnnnnnnnnnnnnnnnnnnnnnnnnnnnnnnnnnnnnnnnnnnnnnnnnnnnnnnnnnnnnnnnnnnnnnnnnnnnnnnnnnnnnnnnnnnnnnnnnnnnnnnnnnnnnnnnnnnnnnnnnnnnnnnnnnnnnnnnnnnnnnnnnnnnnnnnnnnnnnnnnnnnnnnnnnnnnnnnnnnnnnnnnnnnnnnnnnnnnnnnnnnnnnnnnnnnnnnnnnnnnnnnnnnnnnnnnnnnnnnnnnnnnnnnnnnnnnnnnnnnnnnnnnnnnnnnnnnnnnnnnnnnnnnnnnnnnnnnnnnnnnnnnnnnnnnnnnnnnnnnnnnnnnnnnnnnnnnnnnnnnnnnnnnnnnnnnnnnnnnnnnnnnnnnnnnnnnnnnnnnnnnnnnnnnnnnnnnnnnnnnnnnnnnnnnnnnnnnnnnnnnnnnnnnnnnnnnnnnnnnnnnnnnnnnnnnnnnnnnnnnnnnnnnnnnnnnnnnnnnnnnnnnnnnnnnnnnnnnnnnnnnnnnnnnnnnnnnnnnnnnnnnnnnnnnnnnnnnnnnnnnnnnnnnnnnnnnnnnnnnnnnnnnnnnnnnnnnnnnnnnnnnnnnnnnnnnnnnnnnnnnnnnnnnnnnnnnnnnnnnnnnnnnnnnnnnnnnnnnnnnnnnnnnnnnnnnnnnnnnnnnnnnnnnnnnnnnnnnnnnnnnnnnnnnnnnnnnnnnnnnnnnnnnnnnnnnnnnnnnnnnnnnnnnnnnnnnnnnnnnnnnnnnnnnnnnnnnnnnnnnnnnnnnnnnnnnnnnnnnnnnnnnnnnnnnnnnnnnnnnnnnnnnnnnnnnnnnnnnnnnnnnnnnnnnnnnnnnnnnnnnnnnnnnnnnnnnnnnnnnnnnnnnnnnnnnnnnnnnnnnnnnnnnnnnnnnnnnnnnnnnnnnnnnnnnnnnnnnnnnnnnnnnnnnnnnnnnnnnnnnnnnnnnnnnnnnnnnnnnnnnnnnnnnnnnnnnnnnnnnnnnnnnnnnnnnnnnnnnnnnnnnnnnnnnnnnnnnnnnnnnnnnnnnnnnnnnnnnnnnnnnnnnnnnnnnnnnnnnnnnnnnnnnnnnnnnnnnnnnnnnnnnnnnnnnnnnnnnnnnnnnnnnnnnnnnnnnnnnnnnnnnnnnnnnnnnnnnnnnnnnnnnnnnnnnnnnnnnnnnnnnnnnnnnnnnnnnnnnnnnnnnnnnnnnnnnnnnnnnnnnnnnnnnnnnnnnnnnnnnnnnnnnnnnnnnnnnnnnnnnnnnnnnnnnnnnnnnnnnnnnnnnnnnnnnnnnnnnnnnnnnnnnnnnnnnnnnnnnnnnnnnnnnnnnnnnnnnnnnnnnnnnnnnnnnnnnnnnnnnnnnnnnnnnnnnnnnnnnnnnnnnnnnnnnnnnnnnnnnnnnnnnnnnnnnnnnnnnnnnnnnnnnnnnnnnnnnnnnnnnnnnnnnnnnnnnnnnnnnnnnnnnnnnnnnnnnnnnnnnnnnnnnnnnnnnnnnnnnnnnnnnnnnnnnnnnnnnnnnnnnnnnnnnnnnnnnnnnnnnnnnnnnnnnnnnnnnnnnnnnnnnnnnnnnnnnnnnnnnnnnnnnnnnnnnnnnnnnnnnnnnnnnnnnnnnnnnnnnnnnnnnnnnnnnnnnnnnnnnnnnnnnnnnnnnnnnnnnnnnnnnnnnnnnnnnnnnnnnnnnnnnnnnnnnnnnnnnnnnnnnnnnnnnnnnnnnnnnnnnnnnnnnnnnnnnnnnnnnnnnnnnnnnnnnnnnnnnnnnnnnnnnnnnnnnnnnnnnnnnnnnnnnnnnnnnnnnnnnnnnnnnnnnnnnnnnnnnnnnnnnnnnnnnnnnnnnnnnnnnnnnnnnnnnnnnnnnnnnnnnnnnnnnnnnnnnnnnnnnnnnnnnnnnnnnnnnnnnnnnnnnnnnnnnnnnnnnnnnnnnnnnnnnnnnnnnnnnnnnnnnnnnnnnnnnnnnnnnnnnnnnnnnnnnnnnnnnnnnnnnnnnnnnnnnnnnnnnnnnnnnnnnnnnnnnnnnnnnnnnnnnnnnnnnnnnnnnnnnnnnnnnnnnnnnnnnnnnnnnnnnnnnnnnnnnnnnnnnnnnnnnnnnnnnnnnnnnnnnnnnnnnnnnnnnnnnnnnnnnnnnnnnnnnnnnnnnnnnnnnnnnnnnnnnnnnnnnnnnnnnnnnnnnnnnnnnnnnnnnnnnnnnnnnnnnnnnnnnnnnnnnnnnnnnnnnnnnnnnnnnnnnnnnnnnnnnnnnnnnnnnnnnnnnnnnnnnnnnnnnnnnnnnnnnnnnnnnnnnnnnnnnnnnnnnnnnnnnnnnnnnnnnnnnnnnnnnnnnnnnnnnnnnnnnnnnnnnnnnnnnnnnnnnnnnnnnnnnnnnnnnnnnnnnnnnnnnnnnnnnnnnnnnnnnnnnnnnnnnnnnnnnnnnnnnnnnnnnnnnnnnnnnnnnnnnnnnnnnnnnnnnnnnnnnnnnnnnnnnnnnnnnnnnnnnnnnnnnnnnnnnnnnnnnnnnnnnnnnnnnnnnnnnnnnnnnnnnnnnnnnnnnnnnnnnnnnnnnnnnnnnnnnnnnnnnnnnnnnnnnnnnnnnnnnnnnnnnnnnnnnnnnnnnnnnnnnnnnnnnnnnnnnnnnnnnnnnnnnnnnnnnnnnnnnnnnnnnnnnnnnnnnnnnnnnnnnnnnnnnnnnnnnnnnnnnnnnnnnnnnnnnnnnnnnnnnnnnnnnnnnnnnnnnnnnnnnnnnnnnnnnnnnnnnnnnnnnnnnnnnnnnnnnnnnnnnnnnnnnnnnnnnnnnnnnnnnnnnnnnnnnnnnnnnnnnnnnnnnnnnnnnnnnnnnnnnnnnnnnnnnnnnnnnnnnnnnnnnnnnnnnnnnnnnnnnnnnnnnnnnnnnnnnnnnnnnnnnnnnnnnnnnnnnnnnnnnnnnnnnnnnnnnnnnnnnnnnnnnnnnnnnnnnnnnnnnnnnnnnnnnnnnnnnnnnnnnnnnnnnnnnnnnnnnnnnnnnnnnnnnnnnnnnnnnnnnnnnnnnnnnnnnnnnnnnnnnnnnnnnnnnnnnnnnnnnnnnnnnnnnnnnnnnnnnnnnnnnnnnnnnnnnnnnnnnnnnnnnnnnnnnnnnnnnnnnnnnnnnnnnnnnnnnnnnnnnnnnnnnnnnnnnnnnnnnnnnnnnnnnnnnnnnnnnnnnnnnnnnnnnnnnnnnnnnnnnnnnnnnnnnnnnnnnnnnnnnnnnnnnnnnnnnnnnnnnnnnnnnnnnnnnnnnnnnnnnnnnnnnnnnnnnnnnnnnnnnnnnnnnnnnnnnnnnnnnnnnnnnnnnnnnnnnnnnnnnnnnnnnnnnnnnnnnnnnnnnnnnnnnnnnnnnnnnnnnnnnnnnnnnnnnnnnnnnnnnnnnnnnnnnnnnnnnnnnnnnnnnnnnnnnnnnnnnnnnnnnnnnnnnnnnnnnnnnnnnnnnnnnnnnnnnnnnnnnnnnnnnnnnnnnnnnnnnnnnnnnnnnnnnnnnnnnnnnnnnnnnnnnnnnnnnnnnnnnnnnnnnnnnnnnnnnnnnnnnnnnnnnnnnnnnnnnnnnnnnnnnnnnnnnnnnnnnnnnnnnnnnnnnnnnnnnnnnnnnnnnnnnnnnnnnnnnnnnnnnnnnnnnnnnnnnnnnnnnnnnnnnnnnnnnnnnnnnnnnnnnnnnnnnnnnnnnnnnnnnnnnnnnnnnnnnnnnnnnnnnnnnnnnnnnnnnnnnnnnnnnnnnnnnnnnnnnnnnnnnnnnnnnnnnnnnnnnnnnnnnnnnnnnnnnnnnnnnnnnnnnnnnnnnnnnnnnnnnnnnnnnnnnnnnnnnnnnnnnnnnnnnnnnnnnnnnnnnnnnnnnnnnnnnnnnnnnnnnnnnnnnnnnnnnnnnnnnnnnnnnnnnnnnnnnnnnnnnnnnnnnnnnnnnnnnnnnnnnnnnnnnnnnnnnnnnnnnnnnnnnnnnnnnnnnnnnnnnnnnnnnnnnnnnnnnnnnnnnnnnnnnnnnnnnnnnnnnnnnnnnnnnnnnnnnnnnnnnnnnnnnnnnnnnnnnnnnnnnnnnnnnnnnnnnnnnnnnnnnnnnnnnnnnnnnnnnnnnnnnnnnnnnnnnnnnnnnnnnnnnnnnnnnnnnnnnnnnnnnnnnnnnnnnnnnnnnnnnnnnnnnnnnnnnnnnnnnnnnnnnnnnnnnnnnnnnnnnnnnnnnnnnnnnnnnnnnnnnnnnnnnnnnnnnnnnnnnnnnnnnnnnnnnnnnnnnnnnnnnnnnnnnnnnnnnnnnnnnnnnnnnnnnnnnnnnnnnnnnnnnnnnnnnnnnnnnnnnnnnnnnnnnnnnnnnnnnnnnnnnnnnnnnnnnnnnnnnnnnnnnnnnnnnnnnnnnnnnnnnnnnnnnnnnnnnnnnnnnnnnnnnnnnnnnnnnnnnnnnnnnnnnnnnnnnnnnnnnnnnnnnnnnnnnnnnnnnnnnnnnnnnnnnnnnnnnnnnnnnnnnnnnnnnnnnnnnnnnnnnnnnnnnnnnnnnnnnnnnnnnnnnnnnnnnnnnnnnnnnnnnnnnnnnnnnnnnnnnnnnnnnnnnnnnnnnnnnnnnnnnnnnnnnnnnnnnnnnnnnnnnnnnnnnnnnnnnnnnnnnnnnnnnnnnnnnnnnnnnnnnnnnnnnnnnnnnnnnnnnnnnnnnnnnnnnnnnnnnnnnnnnnnnnnnnnnnnnnnnnnnnnnnnnnnnnnnnnnnnnnnnnnnnnnnnnnnnnnnnnnnnnnnnnnnnnnnnnnnnnnnnnnnnnnnnnnnnnnnnnnnnnnnnnnnnnnnnnnnnnnnnnnnnnnnnnnnnnnnnnnnnnnnnnnnnnnnnnnnnnnnnnnnnnnnnnnnnnnnnnnnnnnnnnnnnnnnnnnnnnnnnnnnnnnnnnnnnnnnnnnnnnnnnnnnnnnnnnnnnnnnnnnnnnnnnnnnnnnnnnnnnnnnnnnnnnnnnnnnnnnnnnnnnnnnnnnnnnnnnnnnnnnnnnnnnnnnnnnnnnnnnnnnnnnnnnnnnnnnnnnnnnnnnnnnnnnnnnnnnnnnnnnnnnnnnnnnnnnnnnnnnnnnnnnnnnnnnnnnnnnnnnnnnnnnnnnnnnnnnnnnnnnnnnnnnnnnnnnnnnnnnnnnnnnnnnnnnnnnnnnnnnnnnnnnnnnnnnnnnnnnnnnnnnnnnnnnnnnnnnnnnnnnnnnnnnnnnnnnnnnnnnnnnnnnnnnnnnnnnnnnnnnnnnnnnnnnnnnnnnnnnnnnnnnnnnnnnnnnnnnnnnnnnnnnnnnnnnnnnnnnnnnnnnnnnnnnnnnnnnnnnnnnnnnnnnnnnnnnnnnnnnnnnnnnnnnnnnnnnnnnnnnnnnnnnnnnnnnnnnnnnnnnnnnnnnnnnnnnnnnnnnnnnnnnnnnnnnnnnnnnnnnnnnnnnnnnnnnnnnnnnnnnnnnnnnnnnnnnnnnnnnnnnnnnnnnnnnnnnnnnnnnnnnnnnnnnnnnnnnnnnnnnnnnnnnnnnnnnnnnnnnnnnnnnnnnnnnnnnnnnnnnnnnnnnnnnnnnnnnnnnnnnnnnnnnnnnnnnnnnnnnnnnnnnnnnnnnnnnnnnnnnnnnnnnnnnnnnnnnnnnnnnnnnnnnnnnnnnnnnnnnnnnnnnnnnnnnnnnnnnnnnnnnnnnnnnnnnnnnnnnnnnnnnnnnnnnnnnnnnnnnnnnnnnnnnnnnnnnnnnnnnnnnnnnnnnnnnnnnnnnnnnnnnnnnnnnnnnnnnnnnnnnnnnnnnnnnnnnnnnnnnnnnnnnnnnnnnnnnnnnnnnnnnnnnnnnnnnnnnnnnnnnnnnnnnnnnnnnnnnnnnnnnnnnnnnnnnnnnnnnnnnnnnnnnnnnnnnnnnnnnnnnnnnnnnnnnnnnnnnnnnnnnnnnnnnnnnnnnnnnnnnnnnnnnnnnnnnnnnnnnnnnnnnnnnnnnnnnnnnnnnnnnnnnnnnnnnnnnnnnnnnnnnnnnnnnnnnnnnnnnnnnnnnnnnnnnnnnnnnnnnnnnnnnnnnnnnnnnnnnnnnnnnnnnnnnnnnnnnnnnnnnnnnnnnnnnnnnnnnnnnnnnnnnnnnnnnnnnnnnnnnnnnnnnnnnnnnnnnnnnnnnnnnnnnnnnnnnnnnnnnnnnnnnnnnnnnnnnnnnnnnnnnnnnnnnnnnnnnnnnnnnnnnnnnnnnnnnnnnnnnnnnnnnnnnnnnnnnnnnnnnnnnnnnnnnnnnnnnnnnnnnnnnnnnnnnnnnnnnnnnnnnnnnnnnnnnnnnnnnnnnnnnnnnnnnnnnnnnnnnnnnnnnnnnnnnnnnnnnnnnnnnnnnnnnnnnnnnnnnnnnnnnnnnnnnnnnnnnnnnnnnnnnnnnnnnnnnnnnnnnnnnnnnnnnnnnnnnnnnnnnnnnnnnnnnnnnnnnnnnnnnnnnnnnnnnnnnnnnnnnnnnnnnnnnnnnnnnnnnnnnnnnnnnnnnnnnnnnnnnnnnnnnnnnnnnnnnnnnnnnnnnnnnnnnnnnnnnnnnnnnnnnnnnnnnnnnnnnnnnnnnnnnnnnnnnnnnnnnnnnnnnnnnnnnnnnnnnnnnnnnnnnnnnnnnnnnnnnnnnnnnnnnnnnnnnnnnnnnnnnnnnnnnnnnnnnnnnnnnnnnnnnnnnnnnnnnnnnnnnnnnnnnnnnnnnnnnnnnnnnnnnnnnnnnnnnnnnnnnnnnnnnnnnnnnnnnnnnnnnnnnnnnnnnnnnnnnnnnnnnnnnnnnnnnnnnnnnnnnnnnnnnnnnnnnnnnnnnnnnnnnnnnnnnnnnnnnnnnnnnnnnnnnnnnnnnnnnnnnnnnnnnnnnnnnnnnnnnnnnnnnnnnnnnnnnnnnnnnnnnnnnnnnnnnnnnnnnnnnnnnnnnnnnnnnnnnnnnnnnnnnnnnnnnnnnnnnnnnnnnnnnnnnnnnnnnnnnnnnnnnnnnnnnnnnnnnnnnnnnnnnnnnnnnnnnnnnnnnnnnnnnnnnnnnnnnnnnnnnnnnnnnnnnnnnnnnnnnnnnnnnnnnnnnnnnnnnnnnnnnnnnnnnnnnnnnnnnnnnnnnnnnnnnnnnnnnnnnnnnnnnnnnnnnnnnnnnnnnnnnnnnnnnnnnnnnnnnnnnnnnnnnnnnnnnnnnnnnnnnnnnnnnnnnnnnnnnnnnnnnnnnnnnnnnnnnnnnnnnnnnnnnnnnnnnnnnnnnnnnnnnnnnnnnnnnnnnnnnnnnnnnnnnnnnnnnnnnnnnnnnnnnnnnnnnnnnnnnnnnnnnnnnnnnnnnnnnnnnnnnnnnnnnnnnnnnnnnnnnnnnnnnnnnnnnnnnnnnnnnnnnnnnnnnnnnnnnnnnnnnnnnnnnnnnnnnnnnnnnnnnnnnnnnnnnnnnnnnnnnnnnnnnnnnnnnnnnnnnnnnnnnnnnnnnnnnnnnnnnnnnnnnnnnnnnnnnnnnnnnnnnnnnnnnnnnnnnnnnnnnnnnnnnnnnnnnnnnnnnnnnnnnnnnnnnnnnnnnnnnnnnnnnnnnnnnnnnnnnnnnnnnnnnnnnnnnnnnnnnnnnnnnnnnnnnnnnnnnnnnnnnnnnnnnnnnnnnnnnnnnnnnnnnnnnnnnnnnnnnnnnnnnnnnnnnnnnnnnnnnnnnnnnnnnnnnnnnnnnnnnnnnnnnnnnnnnnnnnnnnnnnnnnnnnnnnnnnnnnnnnnnnnnnnnnnnnnnnnnnnnnnnnnnnnnnnnnnnnnnnnnnnnnnnnnnnnnnnnnnnnnnnnnnnnnnnnnnnnnnnnnnnnnnnnnnnnnnnnnnnnnnnnnnnnnnnnnnnnnnnnnnnnnnnnnnnnnnnnnnnnnnnnnnnnnnnnnnnnnnnnnnnnnnnnnnnnnnnnnnnnnnnnnnnnnnnnnnnnnnnnnnnnnnnnnnnnnnnnnnnnnnnnnnnnnnnnnnnnnnnnnnnnnnnnnnnnnnnnnnnnnnnnnnnnnnnnnnnnnnnnnnnnnnnnnnnnnnnnnnnnnnnnnnnnnnnnnnnnnnnnnnnnnnnnnnnnnnnnnnnnnnnnnnnnnnnnnnnnnnnnnnnnnnnnnnnnnnnnnnnnnnnnnnnnnnnnnnnnnnnnnnnnnnnnnnnnnnnnnnnnnnnnnnnnnnnnnnnnnnnnnnnnnnnnnnnnnnnnnnnnnnnnnnnnnnnnnnnnnnnnnnnnnnnnnnnnnnnnnnnnnnnnnnnnnnnnnnnnnnnnnnnnnnnnnnnnnnnnnnnnnnnnnnnnnnnnnnnnnnnnnnnnnnnnnnnnnnnnnnnnnnnnnnnnnnnnnnnnnnnnnnnnnnnnnnnnnnnnnnnnnnnnnnnnnnnnnnnnnnnnnnnnnnnnnnnnnnnnnnnnnnnnnnnnnnnnnnnnnnnnnnnnnnnnnnnnnnnnnnnnnnnnnnnnnnnnnnnnnnnnnnnnnnnnnnnnnnnnnnnnnnnnnnnnnnnnnnnnnnnnnnnnnnnnnnnnnnnnnnnnnnnnnnnnnnnnnnnnnnnnnnnnnnnnnnnnnnnnnnnnnnnnnnnnnnnnnnnnnnnnnnnnnnnnnnnnnnnnnnnnnnnnnnnnnnnnnnnnnnnnnnnnnnnnnnnnnnnnnnnnnnnnnnnnnnnnnnnnnnnnnnnnnnnnnnnnnnnnnnnnnnnnnnnnnnnnnnnnnnnnnnnnnnnnnnnnnnnnnnnnnnnnnnnnnnnnnnnnnnnnnnnnnnnnnnnnnnnnnnnnnnnnnnnnnnnnnnnnnnnnnnnnnnnnnnnnnnnnnnnnnnnnnnnnnnnnnnnnnnnnnnnnnnnnnnnnnnnnnnnnnnnnnnnnnnnnnnnnnnnnnnnnnnnnnnnnnnnnnnnnnnnnnnnnnnnnnnnnnnnnnnnnnnnnnnnnnnnnnnnnnnnnnnnnnnnnnnnnnnnnnnnnnnnnnnnnnnnnnnnnnnnnnnnnnnnnnnnnnnnnnnnnnnnnnnnnnnnnnnnnnnnnnnnnnnnnnnnnnnnnnnnnnnnnnnnnnnnnnnnnnnnnnnnnnnnnnnnnnnnnnnnnnnnnnnnnnnnnnnnnnnnnnnnnnnnnnnnnnnnnnnnnnnnnnnnnnnnnnnnnnnnnnnnnnnnnnnnnnnnnnnnnnnnnnnnnnnnnnnnnnnnnnnnnnnnnnnnnnnnnnnnnnnnnnnnnnnnnnnnnnnnnnnnnnnnnnnnnnnnnnnnnnnnnnnnnnnnnnnnnnnnnnnnnnnnnnnnnnnnnnnnnnnnnnnnnnnnnnnnnnnnnnnnnnnnnnnnnnnnnnnnnnnnnnnnnnnnnnnnnnnnnnnnnnnnnnnnnnnnnnnnnnnnnnnnnnnnnnnnnnnnnnnnnnnnnnnnnnnnnnnnnnnnnnnnnnnnnnnnnnnnnnnnnnnnnnnnnnnnnnnnnnnnnnnnnnnnnnnnnnnnnnnnnnnnnnnnnnnnnnnnnnnnnnnnnnnnnnnnnnnnnnnnnnnnnnnnnnnnnnnnnnnnnnnnnnnnnnnnnnnnnnnnnnnnnnnnnnnnnnnnnnnnnnnnnnnnnnnnnnnnnnnnnnnnnnnnnnnnnnnnnnnnnnnnnnnnnnnnnnnnnnnnnnnnnnnnnnnnnnnnnnnnnnnnnnnnnnnnnnnnnnnnnnnnnnnnnnnnnnnnnnnnnnnnnnnnnnnnnnnnnnnnnnnnnnnnnnnnnnnnnnnnnnnnnnnnnnnnnnnnnnnnnnnnnnnnnnnnnnnnnnnnnnnnnnnnnnnnnnnnnnnnnnnnnnnnnnnnnnnnnnnnnnnnnnnnnnnnnnnnnnnnnnnnnnnnnnnnnnnnnnnnnnnnnnnnnnnnnnnnnnnnnnnnnnnnnnnnnnnnnnnnnnnnnnnnnnnnnnnnnnnnnnnnnnnnnnnnnnnnnnnnnnnnnnnnnnnnnnnnnnnnnnnnnnnnnnnnnnnnnnnnnnnnnnnnnnnnnnnnnnnnnnnnnnnnnnnnnnnnnnnnnnnnnnnnnnnnnnnnnnnnnnnnnnnnnnnnnnnnnnnnnnnnnnnnnnnnnnnnnnnnnnnnnnnnnnnnnnnnnnnnnnnnnnnnnnnnnnnnnnnnnnnnnnnnnnnnnnnnnnnnnnnnnnnnnnnnnnnnnnnnnnnnnnnnnnnnnnnnnnnnnnnnnnnnnnnnnnnnnnnnnnnnnnnnnnnnnnnnnnnnnnnnnnnnnnnnnnnnnnnnnnnnnnnnnnnnnnnnnnnnnnnnnnnnnnnnnnnnnnnnnnnnnnnnnnnnnnnnnnnnnnnnnnnnnnnnnnnnnnnnnnnnnnnnnnnnnnnnnnnnnnnnnnnnnnnnnnnnnnnnnnnnnnnnnnnnnnnnnnnnnnnnnnnnnnnnnnnnnnnnnnnnnnnnnnnnnnnnnnnnnnnnnnnnnnnnnnnnnnnnnnnnnnnnnnnnnnnnnnnnnnnnnnnnnnnnnnnnnnnnnnnnnnnnnnnnnnnnnnnnnnnnnnnnnnnnnnnnnnnnnnnnnnnnnnnnnnnnnnnnnnnnnnnnnnnnnnnnnnnnnnnnnnnnnnnnnnnnnnnnnnnnnnnnnnnnnnnnnnnnnnnnnnnnnnnnnnnnnnnnnnnnnnnnnnnnnnnnnnnnnnnnnnnnnnnnnnnnnnnnnnnnnnnnnnnnnnnnnnnnnnnnnnnnnnnnnnnnnnnnnnnnnnnnnnnnnnnnnnnnnnnnnnnnnnnnnnnnnnnnnnnnnnnnnnnnnnnnnnnnnnnnnnnnnnnnnnnnnnnnnnnnnnnnnnnnnnnnnnnnnnnnnnnnnnnnnnnnnnnnnnnnnnnnnnnnnnnnnnnnnnnnnnnnnnnnnnnnnnnnnnnnnnnnnnnnnnnnnnnnnnnnnnnnnnnnnnnnnnnnnnnnnnnnnnnnnnnnnnnnnnnnnnnnnnnnnnnnnnnnnnnnnnnnnnnnnnnnnnnnnnnnnnnnnnnnnnnnnnnnnnnnnnnnnnnnnnnnnnnnnnnnnnnnnnnnnnnnnnnnnnnnnnnnnnnnnnnnnnnnnnnnnnnnnnnnnnnnnnnnnnnnnnnnnnnnnnnnnnnnnnnnnnnnnnnnnnnnnnnnnnnnnnnnnnnnnnnnnnnnnnnnnnnnnnnnnnnnnnnnnnnnnnnnnnnnnnnnnnnnnnnnnnnnnnnnnnnnnnnnnnnnnnnnnnnnnnnnnnnnnnnnnnnnnnnnnnnnnnnnnnnnnnnnnnnnnnnnnnnnnnnnnnnnnnnnnnnnnnnnnnnnnnnnnnnnnnnnnnnnnnnnnnnnnnnnnnnnnnnnnnnnnnnnnnnnnnnnnnnnnnnnnnnnnnnnnnnnnnnnnnnnnnnnnnnnnnnnnnnnnnnnnnnnnnnnnnnnnnnnnnnnnnnnnnnnnnnnnnnnnnnnnnnnnnnnnnnnnnnnnnnnnnnnnnnnnnnnnnnnnnnnnnnnnnnnnnnnnnnnnnnnnnnnnnnnnnnnnnnnnnnnnnnnnnnnnnnnnnnnnnnnnnnnnnnnnnnnnnnnnnnnnnnnnnnnnnnnnnnnnnnnnnnnnnnnnnnnnnnnnnnnnnnnnnnnnnnnnnnnnnnnnnnnnnnnnnnnnnnnnnnnnnnnnnnnnnnnnnnnnnnnnnnnnnnnnnnnnnnnnnnnnnnnnnnnnnnnnnnnnnnnnnnnnnnnnnnnnnnnnnnnnnnnnnnnnnnnnnnnnnnnnnnnnnnnnnnnnnnnnnnnnnnnnnnnnnnnnnnnnnnnnnnnnnnnnnnnnnnnnnnnnnnnnnnnnnnnnnnnnnnnnnnnnnnnnnnnnnnnnnnnnnnnnnnnnnnnnnnnnnnnnnnnnnnnnnnnnnnnnnnnnnnnnnnnnnnnnnnnnnnnnnnnnnnnnnnnnnnnnnnnnnnnnnnnnnnnnnnnnnnnnnnnnnnnnnnnnnnnnnnnnnnnnnnnnnnnnnnnnnnnnnnnnnnnnnnnnnnnnnnnnnnnnnnnnnnnnnnnnnnnnnnnnnnnnnnnnnnnnnnnnnnnnnnnnnnnnnnnnnnnnnnnnnnnnnnnnnnnnnnnnnnnnnnnnnnnnnnnnnnnnnnnnnnnnnnnnnnnnnnnnnnnnnnnnnnnnnnnnnnnnnnnnnnnnnnnnnnnnnnnnnnnnnnnnnnnnnnnnnnnnnnnnnnnnnnnnnnnnnnnnnnnnnnnnnnnnnnnnnnnnnnnnnnnnnnnnnnnnnnnnnnnnnnnnnnnnnnnnnnnnnnnnnnnnnnnnnnnnnnnnnnnnnnnnnnnnnnnnnnnnnnnnnnnnnnnnnnnnnnnnnnnnnnnnnnnnnnnnnnnnnnnnnnnnnnnnnnnnnnnnnnnnnnnnnnnnnnnnnnnnnnnnnnnnnnnnnnnnnnnnnnnnnnnnnnnnnnnnnnnnnnnnnnnnnnnnnnnnnnnnnnnnnnnnnnnnnnnnnnnnnnnnnnnnnnnnnnnnnnnnnnnnnnnnnnnnnnnnnnnnnnnnnnnnnnnnnnnnnnnnnnnnnnnnnnnnnnnnnnnnnnnnnnnnnnnnnnnnnnnnnnnnnnnnnnnnnnnnnnnnnnnnnnnnnnnnnnnnnnnnnnnnnnnnnnnnnnnnnnnnnnnnnnnnnnnnnnnnnnnnnnnnnnnnnnnnnnnnnnnnnnnnnnnnnnnnnnnnnnnnnnnnnnnnnnnnnnnnnnnnnnnnnnnnnnnnnnnnnnnnnnnnnnnnnnnnnnnnnnnnnnnnnnnnnnnnnnnnnnnnnnnnnnnnnnnnnnnnnnnnnnnnnnnnnnnnnnnnnnnnnnnnnnnnnnnnnnnnnnnnnnnnnnnnnnnnnnnnnnnnnnnnnnnnnnnnnnnnnnnnnnnnnnnnnnnnnnnnnnnnnnnnnnnnnnnnnnnnnnnnnnnnnnnnnnnnnnnnnnnnnnnnnnnnnnnnnnnnnnnnnnnnnnnnnnnnnnnnnnnnnnnnnnnnnnnnnnnnnnnnnnnnnnnnnnnnnnnnnnnnnnnnnnnnnnnnnnnnnnnnnnnnnnnnnnnnnnnnnnnnnnnnnnnnnnnnnnnnnnnnnnnnnnnnnnnnnnnnnnnnnnnnnnnnnnnnnnnnnnnnnnnnnnnnnnnnnnnnnnnnnnnnnnnnnnnnnnnnnnnnnnnnnnnnnnnnnnnnnnnnnnnnnnnnnnnnnnnnnnnnnnnnnnnnnnnnnnnnnnnnnnnnnnnnnnnnnnnnnnnnnnnnnnnnnnnnnnnnnnnnnnnnnnnnnnnnnnnnnnnnnnnnnnnnnnnnnnnnnnnnnnnnnnnnnnnnnnnnnnnnnnnnnnnnnnnnnnnnnnnnnnnnnnnnnnnnnnnnnnnnnnnnnnnnnnnnnnnnnnnnnnnnnnnnnnnnnnnnnnnnnnnnnnnnnnnnnnnnnnnnnnnnnnnnnnnnnnnnnnnnnnnnnnnnnnnnnnnnnnnnnnnnnnnnnnnnnnnnnnnnnnnnnnnnnnnnnnnnnnnnnnnnnnnnnnnnnnnnnnnnnnnnnnnnnnnnnnnnnnnnnnnnnnnnnnnnnnnnnnnnnnnnnnnnnnnnnnnnnnnnnnnnnnnnnnnnnnnnnnnnnnnnnnnnnnnnnnnnnnnnnnnnnnnnnnnnnnnnnnnnnnnnnnnnnnnnnnnnnnnnnnnnnnnnnnnnnnnnnnnnnnnnnnnnnnnnnnnnnnnnnnnnnnnnnnnnnnnnnnnnnnnnnnnnnnnnnnnnnnnnnnnnnnnnnnnnnnnnnnnnnnnnnnnnnnnnnnnnnnnnnnnnnnnnnnnnnnnnnnnnnnnnnnnnnnnnnnnnnnnnnnnnnnnnnnnnnnnnnnnnnnnnnnnnnnnnnnnnnnnnnnnnnnnnnnnnnnnnnnnnnnnnnnnnnnnnnnnnnnnnnnnnnnnnnnnnnnnnnnnnnnnnnnnnnnnnnnnnnnnnnnnnnnnnnnnnnnnnnnnnnnnnnnnnnnnnnnnnnnnnnnnnnnnnnnnnnnnnnnnnnnnnnnnnnnnnnnnnnnnnnnnnnnnnnnnnnnnnnnnnnnnnnnnnnnnnnnnnnnnnnnnnnnnnnnnnnnnnnnnnnnnnnnnnnnnnnnnnnnnnnnnnnnnnnnnnnnnnnnnnnnnnnnnnnnnnnnnnnnnnnnnnnnnnnnnnnnnnnnnnnnnnnnnnnnnnnnnnnnnnnnnnnnnnnnnnnnnnnnnnnnnnnnnnnnnnnnnnnnnnnnnnnnnnnnnnnnnnnnnnnnnnnnnnnnnnnnnnnnnnnnnnnnnnnnnnnnnnnnnnnnnnnnnnnnnnnnnnnnnnnnnnnnnnnnnnnnnnnnnnnnnnnnnnnnnnnnnnnnnnnnnnnnnnnnnnnnnnnnnnnnnnnnnnnnnnnnnnnnnnnnnnnnnnnnnnnnnnnnnnnnnnnnnnnnnnnnnnnnnnnnnnnnnnnnnnnnnnnnnnnnnnnnnnnnnnnnnnnnnnnnnnnnnnnnnnnnnnnnnnnnnnnnnnnnnnnnnnnnnnnnnnnnnnnnnnnnnnnnnnnnnnnnnnnnnnnnnnnnnnnnnnnnnnnnnnnnnnnnnnnnnnnnnnnnnnnnnnnnnnnnnnnnnnnnnnnnnnnnnnnnnnnnnnnnnnnnnnnnnnnnnnnnnnnnnnnnnnnnnnnnnnnnnnnnnnnnnnnnnnnnnnnnnnnnnnnnnnnnnnnnnnnnnnnnnnnnnnnnnnnnnnnnnnnnnnnnnnnnnnnnnnnnnnnnnnnnnnnnnnnnnnnnnnnnnnnnnnnnnnnnnnnnnnnnnnnnnnnnnnnnnnnnnnnnnnnnnnnnnnnnnnnnnnnnnnnnnnnnnnnnnnnnnnnnnnnnnnnnnnnnnnnnnnnnnnnnnnnnnnnnnnnnnnnnnnnnnnnnnnnnnnnnnnnnnnnnnnnnnnnnnnnnnnnnnnnnnnnnnnnnnnnnnnnnnnnnnnnnnnnnnnnnnnnnnnnnnnnnnnnnnnnnnnnnnnnnnnnnnnnnnnnnnnnnnnnnnnnnnnnnnnnnnnnnnnnnnnnnnnnnnnnnnnnnnnnnnnnnnnnnnnnnnnnnnnnnnnnnnnnnnnnnnnnnnnnnnnnnnnnnnnnnnnnnnnnnnnnnnnnnnnnnnnnnnnnnnnnnnnnnnnnnnnnnnnnnnnnnnnnnnnnnnnnnnnnnnnnnnnnnnnnnnnnnnnnnnnnnnnnnnnnnnnnnnnnnnnnnnnnnnnnnnnnnnnnnnnnnnnnnnnnnnnnnnnnnnnnnnnnnnnnnnnnnnnnnnnnnnnnnnnnnnnnnnnnnnnnnnnnnnnnnnnnnnnnnnnnnnnnnnnnnnnnnnnnnnnnnnnnnnnnnnnnnnnnnnnnnnnnnnnnnnnnnnnnnnnnnnnnnnnnnnnnnnnnnnnnnnnnnnnnnnnnnnnnnnnnnnnnnnnnnnnnnnnnnnnnnnnnnnnnnnnnnnnnnnnnnnnnnnnnnnnnnnnnnnnnnnnnnnnnnnnnnnnnnnnnnnnnnnnnnnnnnnnnnnnnnnnnnnnnnnnnnnnnnnnnnnnnnnnnnnnnnnnnnnnnnnnnnnnnnnnnnnnnnnnnnnnnnnnnnnnnnnnnnnnnnnnnnnnnnnnnnnnnnnnnnnnnnnnnnnnnnnnnnnnnnnnnnnnnnnnnnnnnnnnnnnnnnnnnnnnnnnnnnnnnnnnnnnnnnnnnnnnnnnnnnnnnnnnnnnnnnnnnnnnnnnnnnnnnnnnnnnnnnnnnnnnnnnnnnnnnnnnnnnnnnnnnnnnnnnnnnnnnnnnnnnnnnnnnnnnnnnnnnnnnnnnnnnnnnnnnnnnnnnnnnnnnnnnnnnnnnnnnnnnnnnnnnnnnnnnnnnnnnnnnnnnnnnnnnnnnnnnnnnnnnnnnnnnnnnnnnnnnnnnnnnnnnnnnnnnnnnnnnnnnnnnnnnnnnnnnnnnnnnnnnnnnnnnnnnnnnnnnnnnnnnnnnnnnnnnnnnnnnnnnnnnnnnnnnnnnnnnnnnnnnnnnnnnnnnnnnnnnnnnnnnnnnnnnnnnnnnnnnnnnnnnnnnnnnnnnnnnnnnnnnnnnnnnnnnnnnnnnnnnnnnnnnnnnnnnnnnnnnnnnnnnnnnnnnnnnnnnnnnnnnnnnnnnnnnnnnnnnnnnnnnnnnnnnnnnnnnnnnnnnnnnnnnnnnnnnnnnnnnnnnnnnnnnnnnnnnnnnnnnnnnnnnnnnnnnnnnnnnnnnnnnnnnnnnnnnnnnnnnnnnnnnnnnnnnnnnnnnnnnnnnnnnnnnnnnnnnnnnnnnnnnnnnnnnnnnnnnnnnnnnnnnnnnnnnnnnnnnnnnnnnnnnnnnnnnnnnnnnnnnnnnnnnnnnnnnnnnnnnnnnnnnnnnnnnnnnnnnnnnnnnnnnnnnnnnnnnnnnnnnnnnnnnnnnnnnnnnnnnnnnnnnnnnnnnnnnnnnnnnnnnnnnnnnnnnnnnnnnnnnnnnnnnnnnnnnnnnnnnnnnnnnnnnnnnnnnnnnnnnnnnnnnnnnnnnnnnnnnnnnnnnnnnnnnnnnnnnnnnnnnnnnnnnnnnnnnnnnnnnnnnnnnnnnnnnnnnnnnnnnnnnnnnnnnnnnnnnnnnnnnnnnnnnnnnnnnnnnnnnnnnnnnnnnnnnnnnnnnnnnnnnnnnnnnnnnnnnnnnnnnnnnnnnnnnnnnnnnnnnnnnnnnnnnnnnnnnnnnnnnnnnnnnnnnnnnnnnnnnnnnnnnnnnnnnnnnnnnnnnnnnnnnnnnnnnnnnnnnnnnnnnnnnnnnnnnnnnnnnnnnnnnnnnnnnnnnnnnnnnnnnnnnnnnnnnnnnnnnnnnnnnnnnnnnnnnnnnnnnnnnnnnnnnnnnnnnnnnnnnnnnnnnnnnnnnnnnnnnnnnnnnnnnnnnnnnnnnnnnnnnnnnnnnnnnnnnnnnnnnnnnnnnnnnnnnnnnnnnnnnnnnnnnnnnnnnnnnnnnnnnnnnnnnnnnnnnnnnnnnnnnnnnnnnnnnnnnnnnnnnnnnnnnnnnnnnnnnnnnnnnnnnnnnnnnnnnnnnnnnnnnnnnnnnnnnnnnnnnnnnnnnnnnnnnnnnnnnnnnnnnnnnnnnnnnnnnnnnnnnnnnnnnnnnnnnnnnnnnnnnnnnnnnnnnnnnnnnnnnnnnnnnnnnnnnnnnnnnnnnnnnnnnnnnnnnnnnnnnnnnnnnnnnnnnnnnnnnnnnnnnnnnnnnnnnnnnnnnnnnnnnnnnnnnnnnnnnnnnnnnnnnnnnnnnnnnnnnnnnnnnnnnnnnnnnnnnnnnnnnnnnnnnnnnnnnnnnnnnnnnnnnnnnnnnnnnnnnnnnnnnnnnnnnnnnnnnnnnnnnnnnnnnnnnnnnnnnnnnnnnnnnnnnnnnnnnnnnnnnnnnnnnnnnnnnnnnnnnnnnnnnnnnnnnnnnnnnnnnnnnnnnnnnnnnnnnnnnnnnnnnnnnnnnnnnnnnnnnnnnnnnnnnnnnnnnnnnnnnnnnnnnnnnnnnnnnnnnnnnnnnnnnnnnnnnnnnnnnnnnnnnnnnnnnnnnnnnnnnnnnnnnnnnnnnnnnnnnnnnnnnnnnnnnnnnnnnnnnnnnnnnnnnnnnnnnnnnnnnnnnnnnnnnnnnnnnnnnnnnnnnnnnnnnnnnnnnnnnnnnnnnnnnnnnnnnnnnnnnnnnnnnnnnnnnnnnnnnnnnnnnnnnnnnnnnnnnnnnnnnnnnnnnnnnnnnnnnnnnnnnnnnnnnnnnnnnnnnnnnnnnnnnnnnnnnnnnnnnnnnnnnnnnnnnnnnnnnnnnnnnnnnnnnnnnnnnnnnnnnnnnnnnnnnnnnnnnnnnnnnnnnnnnnnnnnnnnnnnnnnnnnnnnnnnnnnnnnnnnnnnnnnnnnnnnnnnnnnnnnnnnnnnnnnnnnnnnnnnnnnnnnnnnnnnnnnnnnnnnnnnnnnnnnnnnnnnnnnnnnnnnnnnnnnnnnnnnnnnnnnnnnnnnnnnnnnnnnnnnnnnnnnnnnnnnnnnnnnnnnnnnnnnnnnnnnnnnnnnnnnnnnnnnnnnnnnnnnnnnnnnnnnnnnnnnnnnnnnnnnnnnnnnnnnnnnnnnnnnnnnnnnnnnnnnnnnnnnnnnnnnnnnnnnnnnnnnnnnnnnnnnnnnnnnnnnnnnnnnnnnnnnnnnnnnnnnnnnnnnnnnnnnnnnnnnnnnnnnnnnnnnnnnnnnnnnnnnnnnnnnnnnnnnnnnnnnnnnnnnnnnnnnnnnnnnnnnnnnnnnnnnnnnnnnnnnnnnnnnnnnnnnnnnnnnnnnnnnnnnnnnnnnnnnnnnnnnnnnnnnnnnnnnnnnnnnnnnnnnnnnnnnnnnnnnnnnnnnnnnnnnnnnnnnnnnnnnnnnnnnnnnnnnnnnnnnnnnnnnnnnnnnnnnnnnnnnnnnnnnnnnnnnnnnnnnnnnnnnnnnnnnnnnnnnnnnnnnnnnnnnnnnnnnnnnnnnnnnnnnnnnnnnnnnnnnnnnnnnnnnnnnnnnnnnnnnnnnnnnnnnnnnnnnnnnnnnnnnnnnnnnnnnnnnnnnnnnnnnnnnnnnnnnnnnnnnnnnnnnnnnnnnnnnnnnnnnnnnnnnnnnnnnnnnnnnnnnnnnnnnnnnnnnnnnnnnnnnnnnnnnnnnnnnnnnnnnnnnnnnnnnnnnnnnnnnnnnnnnnnnnnnnnnnnnnnnnnnnnnnnnnnnnnnnnnnnnnnnnnnnnnnnnnnnnnnnnnnnnnnnnnnnnnnnnnnnnnnnnnnnnnnnnnnnnnnnnnnnnnnnnnnnnnnnnnnnnnnnnnnnnnnnnnnnnnnnnnnnnnnnnnnnnnnnnnnnnnnnnnnnnnnnnnnnnnnnnnnnnnnnnnnnnnnnnnnnnnnnnnnnnnnnnnnnnnnnnnnnnnnnnnnnnnnnnnnnnnnnnnnnnnnnnnnnnnnnnnnnnnnnnnnnnnnnnnnnnnnnnnnnnnnnnnnnnnnnnnnnnnnnnnnnnnnnnnnnnnnnnnnnnnnnnnnnnnnnnnnnnnnnnnnnnnnnnnnnnnnnnnnnnnnnnnnnnnnnnnnnnnnnnnnnnnnnnnnnnnnnnnnnnnnnnnnnnnnnnnnnnnnnnnnnnnnnnnnnnnnnnnnnnnnnnnnnnnnnnnnnnnnnnnnnnnnnnnnnnnnnnnnnnnnnnnnnnnnnnnnnnnnnnnnnnnnnnnnnnnnnnnnnnnnnnnnnnnnnnnnnnnnnnnnnnnnnnnnnnnnnnnnnnnnnnnnnnnnnnnnnnnnnnnnnnnnnnnnnnnnnnnnnnnnnnnnnnnnnnnnnnnnnnnnnnnnnnnnnnnnnnnnnnnnnnnnnnnnnnnnnnnnnnnnnnnnnnnnnnnnnnnnnnnnnnnnnnnnnnnnnnnnnnnnnnnnnnnnnnnnnnnnnnnnnnnnnnnnnnnnnnnnnnnnnnnnnnnnnnnnnnnnnnnnnnnnnnnnnnnnnnnnnnnnnnnnnnnnnnnnnnnnnnnnnnnnnnnnnnnnnnnnnnnnnnnnnnnnnnnnnnnnnnnnnnnnnnnnnnnnnnnnnnnnnnnnnnnnnnnnnnnnnnnnnnnnnnnnnnnnnnnnnnnnnnnnnnnnnnnnnnnnnnnnnnnnnnnnnnnnnnnnnnnnnnnnnnnnnnnnnnnnnnnnnnnnnnnnnnnnnnnnnnnnnnnnnnnnnnnnnnnnnnnnnnnnnnnnnnnnnnnnnnnnnnnnnnnnnnnnnnnnnnnnnnnnnnnnnnnnnnnnnnnnnnnnnnnnnnnnnnnnnnnnnnnnnnnnnnnnnnnnnnnnnnnnnnnnnnnnnnnnnnnnnnnnnnnnnnnnnnnnnnnnnnnnnnnnnnnnnnnnnnnnnnnnnnnnnnnnnnnnnnnnnnnnnnnnnnnnnnnnnnnnnnnnnnnnnnnnnnnnnnnnnnnnnnnnnnnnnnnnnnnnnnnnnnnnnnnnnnnnnnnnnnnnnnnnnnnnnnnnnnnnnnnnnnnnnnnnnnnnnnnnnnnnnnnnnnnnnnnnnnnnnnnnnnnnnnnnnnnnnnnnnnnnnnnnnnnnnnnnnnnnnnnnnnnnnnnnnnnnnnnnnnnnnnnnnnnnnnnnnnnnnnnnnnnnnnnnnnnnnnnnnnnnnnnnnnnnnnnnnnnnnnnnnnnnnnnnnnnnnnnnnnnnnnnnnnnnnnnnnnnnnnnnnnnnnnnnnnnnnnnnnnnnnnnnnnnnnnnnnnnnnnnnnnnnnnnnnnnnnnnnnnnnnnnnnnnnnnnnnnnnnnnnnnnnnnnnnnnnnnnnnnnnnnnnnnnnnnnnnnnnnnnnnnnnnnnnnnnnnnnnnnnnnnnnnnnnnnnnnnnnnnnnnnnnnnnnnnnnnnnnnnnnnnnnnnnnnnnnnnnnnnnnnnnnnnnnnnnnnnnnnnnnnnnnnnnnnnnnnnnnnnnnnnnnnnnnnnnnnnnnnnnnnnnnnnnnnnnnnnnnnnnnnnnnnnnnnnnnnnnnnnnnnnnnnnnnnnnnnnnnnnnnnnnnnnnnnnnnnnnnnnnnnnnnnnnnnnnnnnnnnnnnnnnnnnnnnnnnnnnnnnnnnnnnnnnnnnnnnnnnnnnnnnnnnnnnnnnnnnnnnnnnnnnnnnnnnnnnnnnnnnnnnnnnnnnnnnnnnnnnnnnnnnnnnnnnnnnnnnnnnnnnnnnnnnnnnnnnnnnnnnnnnnnnnnnnnnnnnnnnnnnnnnnnnnnnnnnnnnnnnnnnnnnnnnnnnnnnnnnnnnnnnnnnnnnnnnnnnnnnnnnnnnnnnnnnnnnnnnnnnnnnnnnnnnnnnnnnnnnnnnnnnnnnnnnnnnnnnnnnnnnnnnnnnnnnnnnnnnnnnnnnnnnnnnnnnnnnnnnnnnnnnnnnnnnnnnnnnnnnnnnnnnnnnnnnnnnnnnnnnnnnnnnnnnnnnnnnnnnnnnnnnnnnnnnnnnnnnnnnnnnnnnnnnnnnnnnnnnnnnnnnnnnnnnnnnnnnnnnnnnnnnnnnnnnnnnnnnnnnnnnnnnnnnnnnnnnnnnnnnnnnnnnnnnnnnnnnnnnnnnnnnnnnnnnnnnnnnnnnnnnnnnnnnnnnnnnnnnnnnnnnnnnnnnnnnnnnnnnnnnnnnnnnnnnnnnnnnnnnnnnnnnnnnnnnnnnnnnnnnnnnnnnnnnnnnnnnnnnnnnnnnnnnnnnnnnnnnnnnnnnnnnnnnnnnnnnnnnnnnnnnnnnnnnnnnnnnnnnnnnnnnnnnnnnnnnnnnnnnnnnnnnnnnnnnnnnnnnnnnnnnnnnnnnnnnnnnnnnnnnnnnnnnnnnnnnnnnnnnnnnnnnnnnnnnnnnnnnnnnnnnnnnnnnnnnnnnnnnnnnnnnnnnnnnnnnnnnnnnnnnnnnnnnnnnnnnnnnnnnnnnnnnnnnnnnnnnnnnnnnnnnnnnnnnnnnnnnnnnnnnnnnnnnnnnnnnnnnnnnnnnnnnnnnnnnnnnnnnnnnnnnnnnnnnnnnnnnnnnnnnnnnnnnnnnnnnnnnnnnnnnnnnnnnnnnnnnnnnnnnnnnnnnnnnnnnnnnnnnnnnnnnnnnnnnnnnnnnnnnnnnnnnnnnnnnnnnnnnnnnnnnnnnnnnnnnnnnnnnnnnnnnnnnnnnnnnnnnnnnnnnnnnnnnnnnnnnnnnnnnnnnnnnnnnnnnnnnnnnnnnnnnnnnnnnnnnnnnnnnnnnnnnnnnnnnnnnnnnnnnnnnnnnnnnnnnnnnnnnnnnnnnnnnnnnnnnnnnnnnnnnnnnnnnnnnnnnnnnnnnnnnnnnnnnnnnnnnnnnnnnnnnnnnnnnnnnnnnnnnnnnnnnnnnnnnnnnnnnnnnnnnnnnnnnnnnnnnnnnnnnnnnnnnnnnnnnnnnnnnnnnnnnnnnnnnnnnnnnnnnnnnnnnnnnnnnnnnnnnnnnnnnnnnnnnnnnnnnnnnnnnnnnnnnnnnnnnnnnnnnnnnnnnnnnnnnnnnnnnnnnnnnnnnnnnnnnnnnnnnnnnnnnnnnnnnnnnnnnnnnnnnnnnnnnnnnnnnnnnnnnnnnnnnnnnnnnnnnnnnnnnnnnnnnnnnnnnnnnnnnnnnnnnnnnnnnnnnnnnnnnnnnnnnnnnnnnnnnnnnnnnnnnnnnnnnnnnnnnnnnnnnnnnnnnnnnnnnnnnnnnnnnnnnnnnnnnnnnnnnnnnnnnnnnnnnnnnnnnnnnnnnnnnnnnnnnnnnnnnnnnnnnnnnnnnnnnnnnnnnnnnnnnnnnnnnnnnnnnnnnnnnnnnnnnnnnnnnnnnnnnnnnnnnnnnnnnnnnnnnnnnnnnnnnnnnnnnnnnnnnnnnnnnnnnnnnnnnnnnnnnnnnnnnnnnnnnnnnnnnnnnnnnnnnnnnnnnnnnnnnnnnnnnnnnnnnnnnnnnnnnnnnnnnnnnnnnnnnnnnnnnnnnnnnnnnnnnnnnnnnnnnnnnnnnnnnnnnnnnnnnnnnnnnnnnnnnnnnnnnnnnnnnnnnnnnnnnnnnnnnnnnnnnnnnnnnnnnnnnnnnnnnnnnnnnnnnnnnnnnnnnnnnnnnnnnnnnnnnnnnnnnnnnnnnnnnnnnnnnnnnnnnnnnnnnnnnnnnnnnnnnnnnnnnnnnnnnnnnnnnnnnnnnnnnnnnnnnnnnnnnnnnnnnnnnnnnnnnnnnnnnnnnnnnnnnnnnnnnnnnnnnnnnnnnnnnnnnnnnnnnnnnnnnnnnnnnnnnnnnnnnnnnnnnnnnnnnnnnnnnnnnnnnnnnnnnnnnnnnnnnnnnnnnnnnnnnnnnnnnnnnnnnnnnnnnnnnnnnnnnnnnnnnnnnnnnnnnnnnnnnnnnnnnnnnnnnnnnnnnnnnnnnnnnnnnnnnnnnnnnnnnnnnnnnnnnnnnnnnnnnnnnnnnnnnnnnnnnnnnnnnnnnnnnnnnnnnnnnnnnnnnnnnnnnnnnnnnnnnnnnnnnnnnnnnnnnnnnnnnnnnnnnnnnnnnnnnnnnnnnnnnnnnnnnnnnnnnnnnnnnnnnnnnnnnnnnnnnnnnnnnnnnnnnnnnnnnnnnnnnnnnnnnnnnnnnnnnnnnnnnnnnnnnnnnnnnnnnnnnnnnnnnnnnnnnnnnnnnnnnnnnnnnnnnnnnnnnnnnnnnnnnnnnnnnnnnnnnnnnnnnnnnnnnnnnnnnnnnnnnnnnnnnnnnnnnnnnnnnnnnnnnnnnnnnnnnnnnnnnnnnnnnnnnnnnnnnnnnnnnnnnnnnnnnnnnnnnnnnnnnnnnnnnnnnnnnnnnnnnnnnnnnnnnnnnnnnnnnnnnnnnnnnnnnnnnnnnnnnnnnnnnnnnnnnnnnnnnnnnnnnnnnnnnnnnnnnnnnnnnnnnnnnnnnnnnnnnnnnnnnnnnnnnnnnnnnnnnnnnnnnnnnnnnnnnnnnnnnnnnnnnnnnnnnnnnnnnnnnnnnnnnnnnnnnnnnnnnnnnnnnnnnnnnnnnnnnnnnnnnnnnnnnnnnnnnnnnnnnnnnnnnnnnnnnnnnnnnnnnnnnnnnnnnnnnnnnnnnnnnnnnnnnnnnnnnnnnnnnnnnnnnnnnnnnnnnnnnnnnnnnnnnnnnnnnnnnnnnnnnnnnnnnnnnnnnnnnnnnnnnnnnnnnnnnnnnnnnnnnnnnnnnnnnnnnnnnnnnnnnnnnnnnnnnnnnnnnnnnnnnnnnnnnnnnnnnnnnnnnnnnnnnnnnnnnnnnnnnnnnnnnnnnnnnnnnnnnnnnnnnnnnnnnnnnnnnnnnnnnnnnnnnnnnnnnnnnnnnnnnnnnnnnnnnnnnnnnnnnnnnnnnnnnnnnnnnnnnnnnnnnnnnnnnnnnnnnnnnnnnnnnnnnnnnnnnnnnnnnnnnnnnnnnnnnnnnnnnnnnnnnnnnnnnnnnnnnnnnnnnnnnnnnnnnnnnnnnnnnnnnnnnnnnnnnnnnnnnnnnnnnnnnnnnnnnnnnnnnnnnnnnnnnnnnnnnnnnnnnnnnnnnnnnnnnnnnnnnnnnnnnnnnnnnnnnnnnnnnnnnnnnnnnnnnnnnnnnnnnnnnnnnnnnnnnnnnnnnnnnnnnnnnnnnnnnnnnnnnnnnnnnnnnnnnnnnnnnnnnnnnnnnnnnnnnnnnnnnnnnnnnnnnnnnnnnnnnnnnnnnnnnnnnnnnnnnnnnnnnnnnnnnnnnnnnnnnnnnnnnnnnnnnnnnnnnnnnnnnnnnnnnnnnnnnnnnnnnnnnnnnnnnnnnnnnnnnnnnnnnnnnnnnnnnnnnnnnnnnnnnnnnnnnnnnnnnnnnnnnnnnnnnnnnnnnnnnnnnnnnnnnnnnnnnnnnnnnnnnnnnnnnnnnnnnnnnnnnnnnnnnnnnnnnnnnnnnnnnnnnnnnnnnnnnnnnnnnnnnnnnnnnnnnnnnnnnnnnnnnnnnnnnnnnnnnnnnnnnnnnnnnnnnnnnnnnnnnnnnnnnnnnnnnnnnnnnnnnnnnnnnnnnnnnnnnnnnnnnnnnnnnnnnnnnnnnnnnnnnnnnnnnnnnnnnnnnnnnnnnnnnnnnnnnnnnnnnnnnnnnnnnnnnnnnnnnnnnnnnnnnnnnnnnnnnnnnnnnnnnnnnnnnnnnnnnnnnnnnnnnnnnnnnnnnnnnnnnnnnnnnnnnnnnnnnnnnnnnnnnnnnnnnnnnnnnnnnnnnnnnnnnnnnnnnnnnnnnnnnnnnnnnnnnnnnnnnnnnnnnnnnnnnnnnnnnnnnnnnnnnnnnnnnnnnnnnnnnnnnnnnnnnnnnnnnnnnnnnnnnnnnnnnnnnnnnnnnnnnnnnnnnnnnnnnnnnnnnnnnnnnnnnnnnnnnnnnnnnnnnnnnnnnnnnnnnnnnnnnnnnnnnnnnnnnnnnnnnnnnnnnnnnnnnnnnnnnnnnnnnnnnnnnnnnnnnnnnnnnnnnnnnnnnnnnnnnnnnnnnnnnnnnnnnnnnnnnnnnnnnnnnnnnnnnnnnnnnnnnnnnnnnnnnnnnnnnnnnnnnnnnnnnnnnnnnnnnnnnnnnnnnnnnnnnnnnnnnnnnnnnnnnnnnnnnnnnnnnnnnnnnnnnnnnnnnnnnnnnnnnnnnnnnnnnnnnnnnnnnnnnnnnnnnnnnnnnnnnnnnnnnnnnnnnnnnnnnnnnnnnnnnnnnnnnnnnnnnnnnnnnnnnnnnnnnnnnnnnnnnnnnnnnnnnnnnnnnnnnnnnnnnnnnnnnnnnnnnnnnnnnnnnnnnnnnnnnnnnnnnnnnnnnnnnnnnnnnnnnnnnnnnnnnnnnnnnnnnnnnnnnnnnnnnnnnnnnnnnnnnnnnnnnnnnnnnnnnnnnnnnnnnnnnnnnnnnnnnnnnnnnnnnnnnnnnnnnnnnnnnnnnnnnnnnnnnnnnnnnnnnnnnnnnnnnnnnnnnnnnnnnnnnnnnnnnnnnnnnnnnnnnnnnnnnnnnnnnnnnnnnnnnnnnnnnnnnnnnnnnnnnnnnnnnnnnnnnnnnnnnnnnnnnnnnnnnnnnnnnnnnnnnnnnnnnnnnnnnnnnnnnnnnnnnnnnnnnnnnnnnnnnnnnnnnnnnnnnnnnnnnnnnnnnnnnnnnnnnnnnnnnnnnnnnnnnnnnnnnnnnnnnnnnnnnnnnnnnnnnnnnnnnnnnnnnnnnnnnnnnnnnnnnnnnnnnnnnnnnnnnnnnnnnnnnnnnnnnnnnnnnnnnnnnnnnnnnnnnnnnnnnnnnnnnnnnnnnnnnnnnnnnnnnnnnnnnnnnnnnnnnnnnnnnnnnnnnnnnnnnnnnnnnnnnnnnnnnnnnnnnnnnnnnnnnnnnnnnnnnnnnnnnnnnnnnnnnnnnnnnnnnnnnnnnnnnnnnnnnnnnnnnnnnnnnnnnnnnnnnnnnnnnnnnnnnnnnnnnnnnnnnnnnnnnnnnnnnnnnnnnnnnnnnnnnnnnnnnnnnnnnnnnnnnnnnnnnnnnnnnnnnnnnnnnnnnnnnnnnnnnnnnnnnnnnnnnnnnnnnnnnnnnnnnnnnnnnnnnnnnnnnnnnnnnnnnnnnnnnnnnnnnnnnnnnnnnnnnnnnnnnnnnnnnnnnnnnnnnnnnnnnnnnnnnnnnnnnnnnnnnnnnnnnnnnnnnnnnnnnnnnnnnnnnnnnnnnnnnnnnnnnnnnnnnnnnnnnnnnnnnnnnnnnnnnnnnnnnnnnnnnnnnnnnnnnnnnnnnnnnnnnnnnnnnnnnnnnnnnnnnnnnnnnnnnnnnnnnnnnnnnnnnnnnnnnnnnnnnnnnnnnnnnnnnnnnnnnnnnnnnnnnnnnnnnnnnnnnnnnnnnnnnnnnnnnnnnnnnnnnnnnnnnnnnnnnnnnnnnnnnnnnnnnnnnnnnnnnnnnnnnnnnnnnnnnnnnnnnnnnnnnnnnnnnnnnnnnnnnnnnnnnnnnnnnnnnnnnnnnnnnnnnnnnnnnnnnnnnnnnnnnnnnnnnnnnnnnnnnnnnnnnnnnnnnnnnnnnnnnnnnnnnnnnnnnnnnnnnnnnnnnnnnnnnnnnnnnnnnnnnnnnnnnnnnnnnnnnnnnnnnnnnnnnnnnnnnnnnnnnnnnnnnnnnnnnnnnnnnnnnnnnnnnnnnnnnnnnnnnnnnnnnnnnnnnnnnnnnnnnnnnnnnnnnnnnnnnnnnnnnnnnnnnnnnnnnnnnnnnnnnnnnnnnnnnnnnnnnnnnnnnnnnnnnnnnnnnnnnnnnnnnnnnnnnnnnnnnnnnnnnnnnnnnnnnnnnnnnnnnnnnnnnnnnnnnnnnnnnnnnnnnnnnnnnnnnnnnnnnnnnnnnnnnnnnnnnnnnnnnnnnnnnnnnnnnnnnnnnnnnnnnnnnnnnnnnnnnnnnnnnnnnnnnnnnnnnnnnnnnnnnnnnnnnnnnnnnnnnnnnnnnnnnnnnnnnnnnnnnnnnnnnnnnnnnnnnnnnnnnnnnnnnnnnnnnnnnnnnnnnnnnnnnnnnnnnnnnnnnnnnnnnnnnnnnnnnnnnnnnnnnnnnnnnnnnnnnnnnnnnnnnnnnnnnnnnnnnnnnnnnnnnnnnnnnnnnnnnnnnnnnnnnnnnnnnnnnnnnnnnnnnnnnnnnnnnnnnnnnnnnnnnnnnnnnnnnnnnnnnnnnnnnnnnnnnnnnnnnnnnnnnnnnnnnnnnnnnnnnnnnnnnnnnnnnnnnnnnnnnnnnnnnnnnnnnnnnnnnnnnnnnnnnnnnnnnnnnnnnnnnnnnnnnnnnnnnnnnnnnnnnnnnnnnnnnnnnnnnnnnnnnnnnnnnnnnnnnnnnnnnnnnnnnnnnnnnnnnnnnnnnnnnnnnnnnnnnnnnnnnnnnnnnnnnnnnnnnnnnnnnnnnnnnnnnnnnnnnnnnnnnnnnnnnnnnnnnnnnnnnnnnnnnnnnnnnnnnnnnnnnnnnnnnnnnnnnnnnnnnnnnnnnnnnnnnnnnnnnnnnnnnnnnnnnnnnnnnnnnnnnnnnnnnnnnnnnnnnnnnnnnnnnnnnnnnnnnnnnnnnnnnnnnnnnnnnnnnnnnnnnnnnnnnnnnnnnnnnnnnnnnnnnnnnnnnnnnnnnnnnnnnnnnnnnnnnnnnnnnnnnnnnnnnnnnnnnnnnnnnnnnnnnnnnnnnnnnnnnnnnnnnnnnnnnnnnnnnnnnnnnnnnnnnnnnnnnnnnnnnnnnnnnnnnnnnnnnnnnnnnnnnnnnnnnnnnnnnnnnnnnnnnnnnnnnnnnnnnnnnnnnnnnnnnnnnnnnnnnnnnnnnnnnnnnnnnnnnnnnnnnnnnnnnnnnnnnnnnnnnnnnnnnnnnnnnnnnnnnnnnnnnnnnnnnnnnnnnnnnnnnnnnnnnnnnnnnnnnnnnnnnnnnnnnnnnnnnnnnnnnnnnnnnnnnnnnnnnnnnnnnnnnnnnnnnnnnnnnnnnnnnnnnnnnnnnnnnnnnnnnnnnnnnnnnnnnnnnnnnnnnnnnnnnnnnnnnnnnnnnnnnnnnnnnnnnnnnnnnnnnnnnnnnnnnnnnnnnnnnnnnnnnnnnnnnnnnnnnnnnnnnnnnnnnnnnnnnnnnnnnnnnnnnnnnnnnnnnnnnnnnnnnnnnnnnnnnnnnnnnnnnnnnnnnnnnnnnnnnnnnnnnnnnnnnnnnnnnnnnnnnnnnnnnnnnnnnnnnnnnnnnnnnnnnnnnnnnnnnnnnnnnnnnnnnnnnnnnnnnnnnnnnnnnnnnnnnnnnnnnnnnnnnnnnnnnnnnnnnnnnnnnnnnnnnnnnnnnnnnnnnnnnnnnnnnnnnnnnnnnnnnnnnnnnnnnnnnnnnnnnnnnnnnnnnnnnnnnnnnnnnnnnnnnnnnnnnnnnnnnnnnnnnnnnnnnnnnnnnnnnnnnnnnnnnnnnnnnnnnnnnnnnnnnnnnnnnnnnnnnnnnnnnnnnnnnnnnnnnnnnnnnnnnnnnnnnnnnnnnnnnnnnnnnnnnnnnnnnnnnnnnnnnnnnnnnnnnnnnnnnnnnnnnnnnnnnnnnnnnnnnnnnnnnnnnnnnnnnnnnnnnnnnnnnnnnnnnnnnnnnnnnnnnnnnnnnnnnnnnnnnnnnnnnnnnnnnnnnnnnnnnnnnnnnnnnnnnnnnnnnnnnnnnnnnnnnnnnnnnnnnnnnnnnnnnnnnnnnnnnnnnnnnnnnnnnnnnnnnnnnnnnnnnnnnnnnnnnnnnnnnnnnnnnnnnnnnnnnnnnnnnnnnnnnnnnnnnnnnnnnnnnnnnnnnnnnnnnnnnnnnnnnnnnnnnnnnnnnnnnnnnnnnnnnnnnnnnnnnnnnnnnnnnnnnnnnnnnnnnnnnnnnnnnnnnnnnnnnnnnnnnnnnnnnnnnnnnnnnnnnnnnnnnnnnnnnnnnnnnnnnnnnnnnnnnnnnnnnnnnnnnnnnnnnnnnnnnnnnnnnnnnnnnnnnnnnnnnnnnnnnnnnnnnnnnnnnnnnnnnnnnnnnnnnnnnnnnnnnnnnnnnnnnnnnnnnnnnnnnnnnnnnnnnnnnnnnnnnnnnnnnnnnnnnnnnnnnnnnnnnnnnnnnnnnnnnnnnnnnnnnnnnnnnnnnnnnnnnnnnnnnnnnnnnnnnnnnnnnnnnnnnnnnnnnnnnnnnnnnnnnnnnnnnnnnnnnnnnnnnnnnnnnnnnnnnnnnnnnnnnnnnnnnnnnnnnnnnnnnnnnnnnnnnnnnnnnnnnnnnnnnnnnnnnnnnnnnnnnnnnnnnnnnnnnnnnnnnnnnnnnnnnnnnnnnnnnnnnnnnnnnnnnnnnnnnnnnnnnnnnnnnnnnnnnnnnnnnnnnnnnnnnnnnnnnnnnnnnnnnnnnnnnnnnnnnnnnnnnnnnnnnnnnnnnnnnnnnnnnnnnnnnnnnnnnnnnnnnnnnnnnnnnnnnnnnnnnnnnnnnnnnnnnnnnnnnnnnnnnnnnnnnnnnnnnnnnnnnnnnnnnnnnnnnnnnnnnnnnnnnnnnnnnnnnnnnnnnnnnnnnnnnnnnnnnnnnnnnnnnnnnnnnnnnnnnnnnnnnnnnnnnnnnnnnnnnnnnnnnnnnnnnnnnnnnnnnnnnnnnnnnnnnnnnnnnnnnnnnnnnnnnnnnnnnnnnnnnnnnnnnnnnnnnnnnnnnnnnnnnnnnnnnnnnnnnnnnnnnnnnnnnnnnnnnnnnnnnnnnnnnnnnnnnnnnnnnnnnnnnnnnnnnnnnnnnnnnnnnnnnnnnnnnnnnnnnnnnnnnnnnnnnnnnnnnnnnnnnnnnnnnnnnnnnnnnnnnnnnnnnnnnnnnnnnnnnnnnnnnnnnnnnnnnnnnnnnnnnnnnnnnnnnnnnnnnnnnnnnnnnnnnnnnnnnnnnnnnnnnnnnnnnnnnnnnnnnnnnnnnnnnnnnnnnnnnnnnnnnnnnnnnnnnnnnnnnnnnnnnnnnnnnnnnnnnnnnnnnnnnnnnnnnnnnnnnnnnnnnnnnnnnnnnnnnnnnnnnnnnnnnnnnnnnnnnnnnnnnnnnnnnnnnnnnnnnnnnnnnnnnnnnnnnnnnnnnnnnnnnnnnnnnnnnnnnnnnnnnnnnnnnnnnnnnnnnnnnnnnnnnnnnnnnnnnnnnnnnnnnnnnnnnnnnnnnnnnnnnnnnnnnnnnnnnnnnnnnnnnnnnnnnnnnnnnnnnnnnnnnnnnnnnnnnnnnnnnnnnnnnnnnnnnnnnnnnnnnnnnnnnnnnnnnnnnnnnnnnnnnnnnnnnnnnnnnnnnnnnnnnnnnnnnnnnnnnnnnnnnnnnnnnnnnnnnnnnnnnnnnnnnnnnnnnnnnnnnnnnnnnnnnnnnnnnnnnnnnnnnnnnnnnnnnnnnnnnnnnnnnnnnnnnnnnnnnnnnnnnnnnnnnnnnnnnnnnnnnnnnnnnnnnnnnnnnnnnnnnnnnnnnnnnnnnnnnnnnnnnnnnnnnnnnnnnnnnnnnnnnnnnnnnnnnnnnnnnnnnnnnnnnnnnnnnnnnnnnnnnnnnnnnnnnnnnnnnnnnnnnnnnnnnnnnnnnnnnnnnnnnnnnnnnnnnnnnnnnnnnnnnnnnnnnnnnnnnnnnnnnnnnnnnnnnnnnnnnnnnnnnnnnnnnnnnnnnnnnnnnnnnnnnnnnnnnnnnnnnnnnnnnnnnnnnnnnnnnnnnnnnnnnnnnnnnnnnnnnnnnnnnnnnnnnnnnnnnnnnnnnnnnnnnnnnnnnnnnnnnnnnnnnnnnnnnnnnnnnnnnnnnnnnnnnnnnnnnnnnnnnnnnnnnnnnnnnnnnnnnnnnnnnnnnnnnnnnnnnnnnnnnnnnnnnnnnnnnnnnnnnnnnnnnnnnnnnnnnnnnnnnnnnnnnnnnnnnnnnnnnnnnnnnnnnnnnnnnnnnnnnnnnnnnnnnnnnnnnnnnnnnnnnnnnnnnnnnnnnnnnnnnnnnnnnnnnnnnnnnnnnnnnnnnnnnnnnnnnnnnnnnnnnnnnnnnnnnnnnnnnnnnnnnnnnnnnnnnnnnnnnnnnnnnnnnnnnnnnnnnnnnnnnnnnnnnnnnnnnnnnnnnnnnnnnnnnnnnnnnnnnnnnnnnnnnnnnnnnnnnnnnnnnnnnnnnnnnnnnnnnnnnnnnnnnnnnnnnnnnnnnnnnnnnnnnnnnnnnnnnnnnnnnnnnnnnnnnnnnnnnnnnnnnnnnnnnnnnnnnnnnnnnnnnnnnnnnnnnnnnnnnnnnnnnnnnnnnnnnnnnnnnnnnnnnnnnnnnnnnnnnnnnnnnnnnnnnnnnnnnnnnnnnnnnnnnnnnnnnnnnnnnnnnnnnnnnnnnnnnnnnnnnnnnnnnnnnnnnnnnnnnnnnnnnnnnnnnnnnnnnnnnnnnnnnnnnnnnnnnnnnnnnnnnnnnnnnnnnnnnnnnnnnnnnnnnnnnnnnnnnnnnnnnnnnnnnnnnnnnnnnnnnnnnnnnnnnnnnnnnnnnnnnnnnnnnnnnnnnnnnnnnnnnnnnnnnnnnnnnnnnnnnnnnnnnnnnnnnnnnnnnnnnnnnnnnnnnnnnnnnnnnnnnnnnnnnnnnnnnnnnnnnnnnnnnnnnnnnnnnnnnnnnnnnnnnnnnnnnnnnnnnnnnnnnnnnnnnnnnnnnnnnnnnnnnnnnnnnnnnnnnnnnnnnnnnnnnnnnnnnnnnnnnnnnnnnnnnnnnnnnnnnnnnnnnnnnnnnnnnnnnnnnnnnnnnnnnnnnnnnnnnnnnnnnnnnnnnnnnnnnnnnnnnnnnnnnnnnnnnnnnnnnnnnnnnnnnnnnnnnnnnnnnnnnnnnnnnnnnnnnnnnnnnnnnnnnnnnnnnnnnnnnnnnnnnnnnnnnnnnnnnnnnnnnnnnnnnnnnnnnnnnnnnnnnnnnnnnnnnnnnnnnnnnnnnnnnnnnnnnnnnnnnnnnnnnnnnnnnnnnnnnnnnnnnnnnnnnnnnnnnnnnnnnnnnnnnnnnnnnnnnnnnnnnnnnnnnnnnnnnnnnnnnnnnnnnnnnnnnnnnnnnnnnnnnnnnnnnnnnnnnnnnnnnnnnnnnnnnnnnnnnnnnnnnnnnnnnnnnnnnnnnnnnnnnnnnnnnnnnnnnnnnnnnnnnnnnnnnnnnnnnnnnnnnnnnnnnnnnnnnnnnnnnnnnnnnnnnnnnnnnnnnnnnnnnnnnnnnnnnnnnnnnnnnnnnnnnnnnnnnnnnnnnnnnnnnnnnnnnnnnnnnnnnnnnnnnnnnnnnnnnnnnnnnnnnnnnnnnnnnnnnnnnnnnnnnnnnnnnnnnnnnnnnnnnnnnnnnnnnnnnnnnnnnnnnnnnnnnnnnnnnnnnnnnnnnnnnnnnnnnnnnnnnnnnnnnnnnnnnnnnnnnnnnnnnnnnnnnnnnnnnnnnnnnnnnnnnnnnnnnnnnnnnnnnnnnnnnnnnnnnnnnnnnnnnnnnnnnnnnnnnnnnnnnnnnnnnnnnnnnnnnnnnnnnnnnnnnnnnnnnnnnnnnnnnnnnnnnnnnnnnnnnnnnnnnnnnnnnnnnnnnnnnnnnnnnnnnnnnnnnnnnnnnnnnnnnnnnnnnnnnnnnnnnnnnnnnnnnnnnnnnnnnnnnnnnnnnnnnnnnnnnnnnnnnnnnnnnnnnnnnnnnnnnnnnnnnnnnnnnnnnnnnnnnnnnnnnnnnnnnnnnnnnnnnnnnnnnnnnnnnnnnnnnnnnnnnnnnnnnnnnnnnnnnnnnnnnnnnnnnnnnnnnnnnnnnnnnnnnnnnnnnnnnnnnnnnnnnnnnnnnnnnnnnnnnnnnnnnnnnnnnnnnnnnnnnnnnnnnnnnnnnnnnnnnnnnnnnnnnnnnnnnnnnnnnnnnnnnnnnnnnnnnnnnnnnnnnnnnnnnnnnnnnnnnnnnnnnnnnnnnnnnnnnnnnnnnnnnnnnnnnnnnnnnnnnnnnnnnnnnnnnnnnnnnnnnnnnnnnnnnnnnnnnnnnnnnnnnnnnnnnnnnnnnnnnnnnnnnnnnnnnnnnnnnnnnnnnnnnnnnnnnnnnnnnnnnnnnnnnnnnnnnnnnnnnnnnnnnnnnnnnnnnnnnnnnnnnnnnnnnnnnnnnnnnnnnnnnnnnnnnnnnnnnnnnnnnnnnnnnnnnnnnnnnnnnnnnnnnnnnnnnnnnnnnnnnnnnnnnnnnnnnnnnnnnnnnnnnnnnnnnnnnnnnnnnnnnnnnnnnnnnnnnnnnnnnnnnnnnnnnnnnnnnnnnnnnnnnnnnnnnnnnnnnnnnnnnnnnnnnnnnnnnnnnnnnnnnnnnnnnnnnnnnnnnnnnnnnnnnnnnnnnnnnnnnnnnnnnnnnnnnnnnnnnnnnnnnnnnnnnnnnnnnnnnnnnnnnnnnnnnnnnnnnnnnnnnnnnnnnnnnnnnnnnnnnnnnnnnnnnnnnnnnnnnnnnnnnnnnnnnnnnnnnnnnnnnnnnnnnnnnnnnnnnnnnnnnnnnnnnnnnnnnnnnnnnnnnnnnnnnnnnnnnnnnnnnnnnnnnnnnnnnnnnnnnnnnnnnnnnnnnnnnnnnnnnnnnnnnnnnnnnnnnnnnnnnnnnnnnnnnnnnnnnnnnnnnnnnnnnnnnnnnnnnnnnnnnnnnnnnnnnnnnnnnnnnnnnnnnnnnnnnnnnnnnnnnnnnnnnnnnnnnnnnnnnnnnnnnnnnnnnnnnnnnnnnnnnnnnnnnnnnnnnnnnnnnnnnnnnnnnnnnnnnnnnnnnnnnnnnnnnnnnnnnnnnnnnnnnnnnnnnnnnnnnnnnnnnnnnnnnnnnnnnnnnnnnnnnnnnnnnnnnnnnnnnnnnnnnnnnnnnnnnnnnnnnnnnnnnnnnnnnnnnnnnnnnnnnnnnnnnnnnnnnnnnnnnnnnnnnnnnnnnnnnnnnnnnnnnnnnnnnnnnnnnnnnnnnnnnnnnnnnnnnnnnnnnnnnnnnnnnnnnnnnnnnnnnnnnnnnnnnnnnnnnnnnnnnnnnnnnnnnnnnnnnnnnnnnnnnnnnnnnnnnnnnnnnnnnnnnnnnnnnnnnnnnnnnnnnnnnnnnnnnnnnnnnnnnnnnnnnnnnnnnnnnnnnnnnnnnnnnnnnnnnnnnnnnnnnnnnnnnnnnnnnnnnnnnnnnnnnnnnnnnnnnnnnnnnnnnnnnnnnnnnnnnnnnnnnnnnnnnnnnnnnnnnnnnnnnnnnnnnnnnnnnnnnnnnnnnnnnnnnnnnnnnnnnnnnnnnnnnnnnnnnnnnnnnnnnnnnnnnnnnnnnnnnnnnnnnnnnnnnnnnnnnnnnnnnnnnnnnnnnnnnnnnnnnnnnnnnnnnnnnnnnnnnnnnnnnnnnnnnnnnnnnnnnnnnnnnnnnnnnnnnnnnnnnnnnnnnnnnnnnnnnnnnnnnnnnnnnnnnnnnnnnnnnnnnnnnnnnnnnnnnnnnnnnnnnnnnnnnnnnnnnnnnnnnnnnnnnnnnnnnnnnnnnnnnnnnnnnnnnnnnnnnnnnnnnnnnnnnnnnnnnnnnnnnnnnnnnnnnnnnnnnnnnnnnnnnnnnnnnnnnnnnnnnnnnnnnnnnnnnnnnnnnnnnnnnnnnnnnnnnnnnnnnnnnnnnnnnnnnnnnnnnnnnnnnnnnnnnnnnnnnnnnnnnnnnnnnnnnnnnnnnnnnnnnnnnnnnnnnnnnnnnnnnnnnnnnnnnnnnnnnnnnnnnnnnnnnnnnnnnnnnnnnnnnnnnnnnnnnnnnnnnnnnnnnnnnnnnnnnnnnnnnnnnnnnnnnnnnnnnnnnnnnnnnnnnnnnnnnnnnnnnnnnnnnnnnnnnnnnnnnnnnnnnnnnnnnnnnnnnnnnnnnnnnnnnnnnnnnnnnnnnnnnnnnnnnnnnnnnnnnnnnnnnnnnnnnnnnnnnnnnnnnnnnnnnnnnnnnnnnnnnnnnnnnnnnnnnnnnnnnnnnnnnnnnnnnnnnnnnnnnnnnnnnnnnnnnnnnnnnnnnnnnnnnnnnnnnnnnnnnnnnnnnnnnnnnnnnnnnnnnnnnnnnnnnnnnnnnnnnnnnnnnnnnnnnnnnnnnnnnnnnnnnnnnnnnnnnnnnnnnnnnnnnnnnnnnnnnnnnnnnnnnnnnnnnnnnnnnnnnnnnnnnnnnnnnnnnnnnnnnnnnnnnnnnnnnnnnnnnnnnnnnnnnnnnnnnnnnnnnnnnnnnnnnnnnnnnnnnnnnnnnnnnnnnnnnnnnnnnnnnnnnnnnnnnnnnnnnnnnnnnnnnnnnnnnnnnnnnnnnnnnnnnnnnnnnnnnnnnnnnnnnnnnnnnnnnnnnnnnnnnnnnnnnnnnnnnnnnnnnnnnnnnnnnnnnnnnnnnnnnnnnnnnnnnnnnnnnnnnnnnnnnnnnnnnnnnnnnnnnnnnnnnnnnnnnnnnnnnnnnnnnnnnnnnnnnnnnnnnnnnnnnnnnnnnnnnnnnnnnnnnnnnnnnnnnnnnnnnnnnnnnnnnnnnnnnnnnnnnnnnnnnnnnnnnnnnnnnnnnnnnnnnnnnnnnnnnnnnnnnnnnnnnnnnnnnnnnnnnnnnnnnnnnnnnnnnnnnnnnnnnnnnnnnnnnnnnnnnnnnnnnnnnnnnnnnnnnnnnnnnnnnnnnnnnnnnnnnnnnnnnnnnnnnnnnnnnnnnnnnnnnnnnnnnnnnnnnnnnnnnnnnnnnnnnnnnnnnnnnnnnnnnnnnnnnnnnnnnnnnnnnnnnnnnnnnnnnnnnnnnnnnnnnnnnnnnnnnnnnnnnnnnnnnnnnnnnnnnnnnnnnnnnnnnnnnnnnnnnnnnnnnnnnnnnnnnnnnnnnnnnnnnnnnnnnnnnnnnnnnnnnnnnnnnnnnnnnnnnnnnnnnnnnnnnnnnnnnnnnnnnnnnnnnnnnnnnnnnnnnnnnnnnnnnnnnnnnnnnnnnnnnnnnnnnnnnnnnnnnnnnnnnnnnnnnnnnnnnnnnnnnnnnnnnnnnnnnnnnnnnnnnnnnnnnnnnnnnnnnnnnnnnnnnnnnnnnnnnnnnnnnnnnnnnnnnnnnnnnnnnnnnnnnnnnnnnnnnnnnnnnnnnnnnnnnnnnnnnnnnnnnnnnnnnnnnnnnnnnnnnnnnnnnnnnnnnnnnnnnnnnnnnnnnnnnnnnnnnnnnnnnnnnnnnnnnnnnnnnnnnnnnnnnnnnnnnnnnnnnnnnnnnnnnnnnnnnnnnnnnnnnnnnnnnnnnnnnnnnnnnnnnnnnnnnnnnnnnnnnnnnnnnnnnnnnnnnnnnnnnnnnnnnnnnnnnnnnnnnnnnnnnnnnnnnnnnnnnnnnnnnnnnnnnnnnnnnnnnnnnnnnnnnnnnnnnnnnnnnnnnnnnnnnnnnnnnnnnnnnnnnnnnnnnnnnnnnnnnnnnnnnnnnnnnnnnnnnnnnnnnnnnnnnnnnnnnnnnnnnnnnnnnnnnnnnnnnnnnnnnnnnnnnnnnnnnnnnnnnnnnnnnnnnnnnnnnnnnnnnnnnnnnnnnnnnnnnnnnnnnnnnnnnnnnnnnnnnnnnnnnnnnnnnnnnnnnnnnnnnnnnnnnnnnnnnnnnnnnnnnnnnnnnnnnnnnnnnnnnnnnnnnnnnnnnnnnnnnnnnnnnnnnnnnnnnnnnnnnnnnnnnnnnnnnnnnnnnnnnnnnnnnnnnnnnnnnnnnnnnnnnnnnnnnnnnnnnnnnnnnnnnnnnnnnnnnnnnnnnnnnnnnnnnnnnnnnnnnnnnnnnnnnnnnnnnnnnnnnnnnnnnnnnnnnnnnnnnnnnnnnnnnnnnnnnnnnnnnnnnnnnnnnnnnnnnnnnnnnnnnnnnnnnnnnnnnnnnnnnnnnnnnnnnnnnnnnnnnnnnnnnnnnnnnnnnnnnnnnnnnnnnnnnnnnnnnnnnnnnnnnnnnnnnnnnnnnnnnnnnnnnnnnnnnnnnnnnnnnnnnnnnnnnnnnnnnnnnnnnnnnnnnnnnnnnnnnnnnnnnnnnnnnnnnnnnnnnnnnnnnnnnnnnnnnnnnnnnnnnnnnnnnnnnnnnnnnnnnnnnnnnnnnnnnnnnnnnnnnnnnnnnnnnnnnnnnnnnnnnnnnnnnnnnnnnnnnnnnnnnnnnnnnnnnnnnnnnnnnnnnnnnnnnnnnnnnnnnnnnnnnnnnnnnnnnnnnnnnnnnnnnnnnnnnnnnnnnnnnnnnnnnnnnnnnnnnnnnnnnnnnnnnnnnnnnnnnnnnnnnnnnnnnnnnnnnnnnnnnnnnnnnnnnnnnnnnnnnnnnnnnnnnnnnnnnnnnnnnnnnnnnnnnnnnnnnnnnnnnnnnnnnnnnnnnnnnnnnnnnnnnnnnnnnnnnnnnnnnnnnnnnnnnnnnnnnnnnnnnnnnnnnnnnnnnnnnnnnnnnnnnnnnnnnnnnnnnnnnnnnnnnnnnnnnnnnnnnnnnnnnnnnnnnnnnnnnnnnnnnnnnnnnnnnnnnnnnnnnnnnnnnnnnnnnnnnnnnnnnnnnnnnnnnnnnnnnnnnnnnnnnnnnnnnnnnnnnnnnnnnnnnnnnnnnnnnnnnnnnnnnnnnnnnnnnnnnnnnnnnnnnnnnnnnnnnnnnnnnnnnnnnnnnnnnnnnnnnnnnnnnnnnnnnnnnnnnnnnnnnnnnnnnnnnnnnnnnnnnnnnnnnnnnnnnnnnnnnnnnnnnnnnnnnnnnnnnnnnnnnnnnnnnnnnnnnnnnnnnnnnnnnnnnnnnnnnnnnnnnnnnnnnnnnnnnnnnnnnnnnnnnnnnnnnnnnnnnnnnnnnnnnnnnnnnnnnnnnnnnnnnnnnnnnnnnnnnnnnnnnnnnnnnnnnnnnnnnnnnnnnnnnnnnnnnnnnnnnnnnnnnnnnnnnnnnnnnnnnnnnnnnnnnnnnnnnnnnnnnnnnnnnnnnnnnnnnnnnnnnnnnnnnnnnnnnnnnnnnnnnnnnnnnnnnnnnnnnnnnnnnnnnnnnnnnnnnnnnnnnnnnnnnnnnnnnnnnnnnnnnnnnnnnnnnnnnnnnnnnnnnnnnnnnnnnnnnnnnnnnnnnnnnnnnnnnnnnnnnnnnnnnnnnnnnnnnnnnnnnnnnnnnnnnnnnnnnnnnnnnnnnnnnnnnnnnnnnnnnnnnnnnnnnnnnnnnnnnnnnnnnnnnnnnnnnnnnnnnnnnnnnnnnnnnnnnnnnnnnnnnnnnnnnnnnnnnnnnnnnnnnnnnnnnnnnnnnnnnnnnnnnnnnnnnnnnnnnnnnnnnnnnnnnnnnnnnnnnnnnnnnnnnnnnnnnnnnnnnnnnnnnnnnnnnnnnnnnnnnnnnnnnnnnnnnnnnnnnnnnnnnnnnnnnnnnnnnnnnnnnnnnnnnnnnnnnnnnnnnnnnnnnnnnnnnnnnnnnnnnnnnnnnnnnnnnnnnnnnnnnnnnnnnnnnnnnnnnnnnnnnnnnnnnnnnnnnnnnnnnnnnnnnnnnnnnnnnnnnnnnnnnnnnnnnnnnnnnnnnnnnnnnnnnnnnnnnnnnnnnnnnnnnnnnnnnnnnnnnnnnnnnnnnnnnnnnnnnnnnnnnnnnnnnnnnnnnnnnnnnnnnnnnnnnnnnnnnnnnnnnnnnnnnnnnnnnnnnnnnnnnnnnnnnnnnnnnnnnnnnnnnnnnnnnnnnnnnnnnnnnnnnnnnnnnnnnnnnnnnnnnnnnnnnnnnnnnnnnnnnnnnnnnnnnnnnnnnnnnnnnnnnnnnnnnnnnnnnnnnnnnnnnnnnnnnnnnnnnnnnnnnnnnnnnnnnnnnnnnnnnnnnnnnnnnnnnnnnnnnnnnnnnnnnnnnnnnnnnnnnnnnnnnnnnnnnnnnnnnnnnnnnnnnnnnnnnnnnnnnnnnnnnnnnnnnnnnnnnnnnnnnnnnnnnnnnnnnnnnnnnnnnnnnnnnnnnnnnnnnnnnnnnnnnnnnnnnnnnnnnnnnnnnnnnnnnnnnnnnnnnnnnnnnnnnnnnnnnnnnnnnnnnnnnnnnnnnnnnnnnnnnnnnnnnnnnnnnnnnnnnnnnnnnnnnnnnnnnnnnnnnnnnnnnnnnnnnnnnnnnnnnnnnnnnnnnnnnnnnnnnnnnnnnnnnnnnnnnnnnnnnnnnnnnnnnnnnnnnnnnnnnnnnnnnnnnnnnnnnnnnnnnnnnnnnnnnnnnnnnnnnnnnnnnnnnnnnnnnnnnnnnnnnnnnnnnnnnnnnnnnnnnnnnnnnnnnnnnnnnnnnnnnnnnnnnnnnnnnnnnnnnnnnnnnnnnnnnnnnnnnnnnnnnnnnnnnnnnnnnnnnnnnnnnnnnnnnnnnnnnnnnnnnnnnnnnnnnnnnnnnnnnnnnnnnnnnnnnnnnnnnnnnnnnnnnnnnnnnnnnnnnnnnnnnnnnnnnnnnnnnnnnnnnnnnnnnnnnnnnnnnnnnnnnnnnnnnnnnnnnnnnnnnnnnnnnnnnnnnnnnnnnnnnnnnnnnnnnnnnnnnnnnnnnnnnnnnnnnnnnnnnnnnnnnnnnnnnnnnnnnnnnnnnnnnnnnnnnnnnnnnnnnnnnnnnnnnnnnnnnnnnnnnnnnnnnnnnnnnnnnnnnnnnnnnnnnnnnnnnnnnnnnnnnnnnnnnnnnnnnnnnnnnnnnnnnnnnnnnnnnnnnnnnnnnnnnnnnnnnnnnnnnnnnnnnnnnnnnnnnnnnnnnnnnnnnnnnnnnnnnnnnnnnnnnnnnnnnnnnnnnnnnnnnnnnnnnnnnnnnnnnnnnnnnnnnnnnnnnnnnnnnnnnnnnnnnnnnnnnnnnnnnnnnnnnnnnnnnnnnnnnnnnnnnnnnnnnnnnnnnnnnnnnnnnnnnnnnnnnnnnnnnnnnnnnnnnnnnnnnnnnnnnnnnnnnnnnnnnnnnnnnnnnnnnnnnnnnnnnnnnnnnnnnnnnnnnnnnnnnnnnnnnnnnnnnnnnnnnnnnnnnnnnnnnnnnnnnnnnnnnnnnnnnnnnnnnnnnnnnnnnnnnnnnnnnnnnnnnnnnnnnnnnnnnnnnnnnnnnnnnnnnnnnnnnnnnnnnnnnnnnnnnnnnnnnnnnnnnnnnnnnnnnnnnnnnnnnnnnnnnnnnnnnnnnnnnnnnnnnnnnnnnnnnnnnnnnnnnnnnnnnnnnnnnnnnnnnnnnnnnnnnnnnnnnnnnnnnnnnnnnnnnnnnnnnnnnnnnnnnnnnnnnnnnnnnnnnnnnnnnnnnnnnnnnnnnnnnnnnnnnnnnnnnnnnnnnnnnnnnnnnnnnnnnnnnnnnnnnnnnnnnnnnnnnnnnnnnnnnnnnnnnnnnnnnnnnnnnnnnnnnnnnnnnnnnnnnnnnnnnnnnnnnnnnnnnnnnnnnnnnnnnnnnnnnnnnnnnnnnnnnnnnnnnnnnnnnnnnnnnnnnnnnnnnnnnnnnnnnnnnnnnnnnnnnnnnnnnnnnnnnnnnnnnnnnnnnnnnnnnnnnnnnnnnnnnnnnnnnnnnnnnnnnnnnnnnnnnnnnnnnnnnnnnnnnnnnnnnnnnnnnnnnnnnnnnnnnnnnnnnnnnnnnnnnnnnnnnnnnnnnnnnnnnnnnnnnnnnnnnnnnnnnnnnnnnnnnnnnnnnnnnnnnnnnnnnnnnnnnnnnnnnnnnnnnnnnnnnnnnnnnnnnnnnnnnnnnnnnnnnnnnnnnnnnnnnnnnnnnnnnnnnnnnnnnnnnnnnnnnnnnnnnnnnnnnnnnnnnnnnnnnnnnnnnnnnnnnnnnnnnnnnnnnnnnnnnnnnnnnnnnnnnnnnnnnnnnnnnnnnnnnnnnnnnnnnnnnnnnnnnnnnnnnnnnnnnnnnnnnnnnnnnnnnnnnnnnnnnnnnnnnnnnnnnnnnnnnnnnnnnnnnnnnnnnnnnnnnnnnnnnnnnnnnnnnnnnnnnnnnnnnnnnnnnnnnnnnnnnnnnnnnnnnnnnnnnnnnnnnnnnnnnnnnnnnnnnnnnnnnnnnnnnnnnnnnnnnnnnnnnnnnnnnnnnnnnnnnnnnnnnnnnnnnnnnnnnnnnnnnnnnnnnnnnnnnnnnnnnnnnnnnnnnnnnnnnnnnnnnnnnnnnnnnnnnnnnnnnnnnnnnnnnnnnnnnnnnnnnnnnnnnnnnnnnnnnnnnnnnnnnnnnnnnnnnnnnnnnnnnnnnnnnnnnnnnnnnnnnnnnnnnnnnnnnnnnnnnnnnnnnnnnnnnnnnnnnnnnnnnnnnnnnnnnnnnnnnnnnnnnnnnnnnnnnnnnnnnnnnnnnnnnnnnnnnnnnnnnnnnnnnnnnnnnnnnnnnnnnnnnnnnnnnnnnnnnnnnnnnnnnnnnnnnnnnnnnnnnnnnnnnnnnnnnnnnnnnnnnnnnnnnnnnnnnnnnnnnnnnnnnnnnnnnnnnnnnnnnnnnnnnnnnnnnnnnnnnnnnnnnnnnnnnnnnnnnnnnnnnnnnnnnnnnnnnnnnnnnnnnnnnnnnnnnnnnnnnnnnnnnnnnnnnnnnnnnnnnnnnnnnnnnnnnnnnnnnnnnnnnnnnnnnnnnnnnnnnnnnnnnnnnnnnnnnnnnnnnnnnnnnnnnnnnnnnnnnnnnnnnnnnnnnnnnnnnnnnnnnnnnnnnnnnnnnnnnnnnnnnnnnnnnnnnnnnnnnnnnnnnnnnnnnnnnnnnnnnnnnnnnnnnnnnnnnnnnnnnnnnnnnnnnnnnnnnnnnnnnnnnnnnnnnnnnnnnnnnnnnnnnnnnnnnnnnnnnnnnnnnnnnnnnnnnnnnnnnnnnnnnnnnnnnnnnnnnnnnnnnnnnnnnnnnnnnnnnnnnnnnnnnnnnnnnnnnnnnnnnnnnnnnnnnnnnnnnnnnnnnnnnnnnnnnnnnnnnnnnnnnnnnnnnnnnnnnnnnnnnnnnnnnnnnnnnnnnnnnnnnnnnnnnnnnnnnnnnnnnnnnnnnnnnnnnnnnnnnnnnnnnnnnnnnnnnnnnnnnnnnnnnnnnnnnnnnnnnnnnnnnnnnnnnnnnnnnnnnnnnnnnnnnnnnnnnnnnnnnnnnnnnnnnnnnnnnnnnnnnnnnnnnnnnnnnnnnnnnnnnnnnnnnnnnnnnnnnnnnnnnnnnnnnnnnnnnnnnnnnnnnnnnnnnnnnnnnnnnnnnnnnnnnnnnnnnnnnnnnnnnnnnnnnnnnnnnnnnnnnnnnnnnnnnnnnnnnnnnnnnnnnnnnnnnnnnnnnnnnnnnnnnnnnnnnnnnnnnnnnnnnnnnnnnnnnnnnnnnnnnnnnnnnnnnnnnnnnnnnnnnnnnnnnnnnnnnnnnnnnnnnnnnnnnnnnnnnnnnnnnnnnnnnnnnnnnnnnnnnnnnnnnnnnnnnnnnnnnnnnnnnnnnnnnnnnnnnnnnnnnnnnnnnnnnnnnnnnnnnnnnnnnnnnnnnnnnnnnnnnnnnnnnnnnnnnnnnnnnnnnnnnnnnnnnnnnnnnnnnnnnnnnnnnnnnnnnnnnnnnnnnnnnnnnnnnnnnnnnnnnnnnnnnnnnnnnnnnnnnnnnnnnnnnnnnnnnnnnnnnnnnnnnnnnnnnnnnnnnnnnnnnnnnnnnnnnnnnnnnnnnnnnnnnnnnnnnnnnnnnnnnnnnnnnnnnnnnnnnnnnnnnnnnnnnnnnnnnnnnnnnnnnnnnnnnnnnnnnnnnnnnnnnnnnnnnnnnnnnnnnnnnnnnnnnnnnnnnnnnnnnnnnnnnnnnnnnnnnnnnnnnnnnnnnnnnnnnnnnnnnnnnnnnnnnnnnnnnnnnnnnnnnnnnnnnnnnnnnnnnnnnnnnnnnnnnnnnnnnnnnnnnnnnnnnnnnnnnnnnnnnnnnnnnnnnnnnnnnnnnnnnnnnnnnnnnnnnnnnnnnnnnnnnnnnnnnnnnnnnnnnnnnnnnnnnnnnnnnnnnnnnnnnnnnnnnnnnnnnnnnnnnnnnnnnnnnnnnnnnnnnnnnnnnnnnnnnnnnnnnnnnnnnnnnnnnnnnnnnnnnnnnnnnnnnnnnnnnnnnnnnnnnnnnnnnnnnnnnnnnnnnnnnnnnnnnnnnnnnnnnnnnnnnnnnnnnnnnnnnnnnnnnnnnnnnnnnnnnnnnnnnnnnnnnnnnnnnnnnnnnnnnnnnnnnnnnnnnnnnnnnnnnnnnnnnnnnnnnnnnnnnnnnnnnnnnnnnnnnnnnnnnnnnnnnnnnnnnnnnnnnnnnnnnnnnnnnnnnnnnnnnnnnnnnnnnnnnnnnnnnnnnnnnnnnnnnnnnnnnnnnnnnnnnnnnnnnnnnnnnnnnnnnnnnnnnnnnnnnnnnnnnnnnnnnnnnnnnnnnnnnnnnnnnnnnnnnnnnnnnnnnnnnnnnnnnnnnnnnnnnnnnnnnnnnnnnnnnnnnnnnnnnnnnnnnnnnnnnnnnnnnnnnnnnnnnnnnnnnnnnnnnnnnnnnnnnnnnnnnnnnnnnnnnnnnnnnnnnnnnnnnnnnnnnnnnnnnnnnnnnnnnnnnnnnnnnnnnnnnnnnnnnnnnnnnnnnnnnnnnnnnnnnnnnnnnnnnnnnnnnnnnnnnnnnnnnnnnnnnnnnnnnnnnnnnnnnnnnnnnnnnnnnnnnnnnnnnnnnnnnnnnnnnnnnnnnnnnnnnnnnnnnnnnnnnnnnnnnnnnnnnnnnnnnnnnnnnnnnnnnnnnnnnnnnnnnnnnnnnnnnnnnnnnnnnnnnnnnnnnnnnnnnnnnnnnnnnnnnnnnnnnnnnnnnnnnnnnnnnnnnnnnnnnnnnnnnnnnnnnnnnnnnnnnnnnnnnnnnnnnnnnnnnnnnnnnnnnnnnnnnnnnnnnnnnnnnnnnnnnnnnnnnnnnnnnnnnnnnnnnnnnnnnnnnnnnnnnnnnnnnnnnnnnnnnnnnnnnnnnnnnnnnnnnnnnnnnnnnnnnnnnnnnnnnnnnnnnnnnnnnnnnnnnnnnnnnnnnnnnnnnnnnnnnnnnnnnnnnnnnnnnnnnnnnnnnnnnnnnnnnnnnnnnnnnnnnnnnnnnnnnnnnnnnnnnnnnnnnnnnnnnnnnnnnnnnnnnnnnnnnnnnnnnnnnnnnnnnnnnnnnnnnnnnnnnnnnnnnnnnnnnnnnnnnnnnnnnnnnnnnnnnnnnnnnnnnnnnnnnnnnnnnnnnnnnnnnnnnnnnnnnnnnnnnnnnnnnnnnnnnnnnnnnnnnnnnnnnnnnnnnnnnnnnnnnnnnnnnnnnnnnnnnnnnnnnnnnnnnnnnnnnnnnnnnnnnnnnnnnnnnnnnnnnnnnnnnnnnnnnnnnnnnnnnnnnnnnnnnnnnnnnnnnnnnnnnnnnnnnnnnnnnnnnnnnnnnnnnnnnnnnnnnnnnnnnnnnnnnnnnnnnnnnnnnnnnnnnnnnnnnnnnnnnnnnnnnnnnnnnnnnnnnnnnnnnnnnnnnnnnnnnnnnnnnnnnnnnnnnnnnnnnnnnnnnnnnnnnnnnnnnnnnnnnnnnnnnnnnnnnnnnnnnnnnnnnnnnnnnnnnnnnnnnnnnnnnnnnnnnnnnnnnnnnnnnnnnnnnnnnnnnnnnnnnnnnnnnnnnnnnnnnnnnnnnnnnnnnnnnnnnnnnnnnnnnnnnnnnnnnnnnnnnnnnnnnnnnnnnnnnnnnnnnnnnnnnnnnnnnnnnnnnnnnnnnnnnnnnnnnnnnnnnnnnnnnnnnnnnnnnnnnnnnnnnnnnnnnnnnnnnnnnnnnnnnnnnnnnnnnnnnnnnnnnnnnnnnnnnnnnnnnnnnnnnnnnnnnnnnnnnnnnnnnnnnnnnnnnnnnnnnnnnnnnnnnnnnnnnnnnnnnnnnnnnnnnnnnnnnnnnnnnnnnnnnnnnnnnnnnnnnnnnnnnnnnnnnnnnnnnnnnnnnnnnnnnnnnnnnnnnnnnnnnnnnnnnnnnnnnnnnnnnnnnnnnnnnnnnnnnnnnnnnnnnnnnnnnnnnnnnnnnnnnnnnnnnnnnnnnnnnnnnnnnnnnnnnnnnnnnnnnnnnnnnnnnnnnnnnnnnnnnnnnnnnnnnnnnnnnnnnnnnnnnnnnnnnnnnnnnnnnnnnnnnnnnnnnnnnnnnnnnnnnnnnnnnnnnnnnnnnnnnnnnnnnnnnnnnnnnnnnnnnnnnnnnnnnnnnnnnnnnnnnnnnnnnnnnnnnnnnnnnnnnnnnnnnnnnnnnnnnnnnnnnnnnnnnnnnnnnnnnnnnnnnnnnnnnnnnnnnnnnnnnnnnnnnnnnnnnnnnnnnnnnnnnnnnnnnnnnnnnnnnnnnnnnnnnnnnnnnnnnnnnnnnnnnnnnnnnnnnnnnnnnnnnnnnnnnnnnnnnnnnnnnnnnnnnnnnnnnnnnnnnnnnnnnnnnnnnnnnnnnnnnnnnnnnnnnnnnnnnnnnnnnnnnnnnnnnnnnnnnnnnnnnnnnnnnnnnnnnnnnnnnnnnnnnnnnnnnnnnnnnnnnnnnnnnnnnnnnnnnnnnnnnnnnnnnnnnnnnnnnnnnnnnnnnnnnnnnnnnnnnnnnnnnnnnnnnnnnnnnnnnnnnnnnnnnnnnnnnnnnnnnnnnnnnnnnnnnnnnnnnnnnnnnnnnnnnnnnnnnnnnnnnnnnnnnnnnnnnnnnnnnnnnnnnnnnnnnnnnnnnnnnnnnnnnnnnnnnnnnnnnnnnnnnnnnnnnnnnnnnnnnnnnnnnnnnnnnnnnnnnnnnnnnnnnnnnnnnnnnnnnnnnnnnnnnnnnnnnnnnnnnnnnnnnnnnnnnnnnnnnnnnnnnnnnnnnnnnnnnnnnnnnnnnnnnnnnnnnnnnnnnnnnnnnnnnnnnnnnnnnnnnnnnnnnnnnnnnnnnnnnnnnnnnnnnnnnnnnnnnnnnnnnnnnnnnnnnnnnnnnnnnnnnnnnnnnnnnnnnnnnnnnnnnnnnnnnnnnnnnnnnnnnnnnnnnnnnnnnnnnnnnnnnnnnnnnnnnnnnnnnnnnnnnnnnnnnnnnnnnnnnnnnnnnnnnnnnnnnnnnnnnnnnnnnnnnnnnnnnnnnnnnnnnnnnnnnnnnnnnnnnnnnnnnnnnnnnnnnnnnnnnnnnnnnnnnnnnnnnnnnnnnnnnnnnnnnnnnnnnnnnnnnnnnnnnnnnnnnnnnnnnnnnnnnnnnnnnnnnnnnnnnnnnnnnnnnnnnnnnnnnnnnnnnnnnnnnnnnnnnnnnnnnnnnnnnnnnnnnnnnnnnnnnnnnnnnnnnnnnnnnnnnnnnnnnnnnnnnnnnnnnnnnnnnnnnnnnnnnnnnnnnnnnnnnnnnnnnnnnnnnnnnnnnnnnnnnnnnnnnnnnnnnnnnnnnnnnnnnnnnnnnnnnnnnnnnnnnnnnnnnnnnnnnnnnnnnnnnnnnnnnnnnnnnnnnnnnnnnnnnnnnnnnnnnnnnnnnnnnnnnnnnnnnnnnnnnnnnnnnnnnnnnnnnnnnnnnnnnnnnnnnnnnnnnnnnnnnnnnnnnnnnnnnnnnnnnnnnnnnnnnnnnnnnnnnnnnnnnnnnnnnnnnnnnnnnnnnnnnnnnnnnnnnnnnnnnnnnnnnnnnnnnnnnnnnnnnnnnnnnnnnnnnnnnnnnnnnnnnnnnnnnnnnnnnnnnnnnnnnnnnnnnnnnnnnnnnnnnnnnnnnnnnnnnnnnnnnnnnnnnnnnnnnnnnnnnnnnnnnnnnnnnnnnnnnnnnnnnnnnnnnnnnnnnnnnnnnnnnnnnnnnnnnnnnnnnnnnnnnnnnnnnnnnnnnnnnnnnnnnnnnnnnnnnnnnnnnnnnnnnnnnnnnnnnnnnnnnnnnnnnnnnnnnnnnnnnnnnnnnnnnnnnnnnnnnnnnnnnnnnnnnnnnnnnnnnnnnnnnnnnnnnnnnnnnnnnnnnnnnnnnnnnnnnnnnnnnnnnnnnnnnnnnnnnnnnnnnnnnnnnnnnnnnnnnnnnnnnnnnnnnnnnnnnnnnnnnnnnnnnnnnnnnnnnnnnnnnnnnnnnnnnnnnnnnnnnnnnnnnnnnnnnnnnnnnnnnnnnnnnnnnnnnnnnnnnnnnnnnnnnnnnnnnnnnnnnnnnnnnnnnnnnnnnnnnnnnnnnnnnnnnnnnnnnnnnnnnnnnnnnnnnnnnnnnnnnnnnnnnnnnnnnnnnnnnnnnnnnnnnnnnnnnnnnnnnnnnnnnnnnnnnnnnnnnnnnnnnnnnnnnnnnnnnnnnnnnnnnnnnnnnnnnnnnnnnnnnnnnnnnnnnnnnnnnnnnnnnnnnnnnnnnnnnnnnnnnnnnnnnnnnnnnnnnnnnnnnnnnnnnnnnnnnnnnnnnnnnnnnnnnnnnnnnnnnnnnnnnnnnnnnnnnnnnnnnnnnnnnnnnnnnnnnnnnnnnnnnnnnnnnnnnnnnnnnnnnnnnnnnnnnnnnnnnnnnnnnnnnnnnnnnnnnnnnnnnnnnnnnnnnnnnnnnnnnnnnnnnnnnnnnnnnnnnnnnnnnnnnnnnnnnnnnnnnnnnnnnnnnnnnnnnnnnnnnnnnnnnnnnnnnnnnnnnnnnnnnnnnnnnnnnnnnnnnnnnnnnnnnnnnnnnnnnnnnnnnnnnnnnnnnnnnnnnnnnnnnnnnnnnnnnnnnnnnnnnnnnnnnnnnnnnnnnnnnnnnnnnnnnnnnnnnnnnnnnnnnnnnnnnnnnnnnnnnnnnnnnnnnnnnnnnnnnnnnnnnnnnnnnnnnnnnnnnnnnnnnnnnnnnnnnnnnnnnnnnnnnnnnnnnnnnnnnnnnnnnnnnnnnnnnnnnnnnnnnnnnnnnnnnnnnnnnnnnnnnnnnnnnnnnnnnnnnnnnnnnnnnnnnnnnnnnnnnnnnnnnnnnnnnnnnnnnnnnnnnnnnnnnnnnnnnnnnnnnnnnnnnnnnnnnnnnnnnnnnnnnnnnnnnnnnnnnnnnnnnnnnnnnnnnnnnnnnnnnnnnnnnnnnnnnnnnnnnnnnnnnnnnnnnnnnnnnnnnnnnnnnnnnnnnnnnnnnnnnnnnnnnnnnnnnnnnnnnnnnnnnnnnnnnnnnnnnnnnnnnnnnnnnnnnnnnnnnnnnnnnnnnnnnnnnnnnnnnnnnnnnnnnnnnnnnnnnnnnnnnnnnnnnnnnnnnnnnnnnnnnnnnnnnnnnnnnnnnnnnnnnnnnnnnnnnnnnnnnnnnnnnnnnnnnnnnnnnnnnnnnnnnnnnnnnnnnnnnnnnnnnnnnnnnnnnnnnnnnnnnnnnnnnnnnnnnnnnnnnnnnnnnnnnnnnnnnnnnnnnnnnnnnnnnnnnnnnnnnnnnnnnnnnnnnnnnnnnnnnnnnnnnnnnnnnnnnnnnnnnnnnnnnnnnnnnnnnnnnnnnnnnnnnnnnnnnnnnnnnnnnnnnnnnnnnnnnnnnnnnnnnnnnnnnnnnnnnnnnnnnnnnnnnnnnnnnnnnnnnnnnnnnnnnnnnnnnnnnnnnnnnnnnnnnnnnnnnnnnnnnnnnnnnnnnnnnnnnnnnnnnnnnnnnnnnnnnnnnnnnnnnnnnnnnnnnnnnnnnnnnnnnnnnnnnnnnnnnnnnnnnnnnnnnnnnnnnnnnnnnnnnnnnnnnnnnnnnnnnnnnnnnnnnnnnnnnnnnnnnnnnnnnnnnnnnnnnnnnnnnnnnnnnnnnnnnnnnnnnnnnnnnnnnnnnnnnnnnnnnnnnnnnnnnnnnnnnnnnnnnnnnnnnnnnnnnnnnnnnnnnnnnnnnnnnnnnnnnnnnnnnnnnnnnnnnnnnnnnnnnnnnnnnnnnnnnnnnnnnnnnnnnnnnnnnnnnnnnnnnnnnnnnnnnnnnnnnnnnnnnnnnnnnnnnnnnnnnnnnnnnnnnnnnnnnnnnnnnnnnnnnnnnnnnnnnnnnnnnnnnnnnnnnnnnnnnnnnnnnnnnnnnnnnnnnnnnnnnnnnnnnnnnnnnnnnnnnnnnnnnnnnnnnnnnnnnnnnnnnnnnnnnnnnnnnnnnnnnnnnnnnnnnnnnnnnnnnnnnnnnnnnnnnnnnnnnnnnnnnnnnnnnnnnnnnnnnnnnnnnnnnnnnnnnnnnnnnnnnnnnnnnnnnnnnnnnnnnnnnnnnnnnnnnnnnnnnnnnnnnnnnnnnnnnnnnnnnnnnnnnnnnnnnnnnnnnnnnnnnnnnnnnnnnnnnnnnnnnnnnnnnnnnnnnnnnnnnnnnnnnnnnnnnnnnnnnnnnnnnnnnnnnnnnnnnnnnnnnnnnnnnnnnnnnnnnnnnnnnnnnnnnnnnnnnnnnnnnnnnnnnnnnnnnnnnnnnnnnnnnnnnnnnnnnnnnnnnnnnnnnnnnnnnnnnnnnnnnnnnnnnnnnnnnnnnnnnnnnnnnnnnnnnnnnnnnnnnnnnnnnnnnnnnnnnnnnnnnnnnnnnnnnnnnnnnnnnnnnnnnnnnnnnnnnnnnnnnnnnnnnnnnnnnnnnnnnnnnnnnnnnnnnnnnnnnnnnnnnnnnnnnnnnnnnnnnnnnnnnnnnnnnnnnnnnnnnnnnnnnnnnnnnnnnnnnnnnnnnnnnnnnnnnnnnnnnnnnnnnnnnnnnnnnnnnnnnnnnnnnnnnnnnnnnnnnnnnnnnnnnnnnnnnnnnnnnnnnnnnnnnnnnnnnnnnnnnnnnnnnnnnnnnnnnnnnnnnnnnnnnnnnnnnnnnnnnnnnnnnnnnnnnnnnnnnnnnnnnnnnnnnnnnnnnnnnnnnnnnnnnnnnnnnnnnnnnnnnnnnnnnnnnnnnnnnnnnnnnnnnnnnnnnnnnnnnnnnnnnnnnnnnnnnnnnnnnnnnnnnnnnnnnnnnnnnnnnnnnnnnnnnnnnnnnnnnnnnnnnnnnnnnnnnnnnnnnnnnnnnnnnnnnnnnnnnnnnnnnnnnnnnnnnnnnnnnnnnnnnnnnnnnnnnnnnnnnnnnnnnnnnnnnnnnnnnnnnnnnnnnnnnnnnnnnnnnnnnnnnnnnnnnnnnnnnnnnnnnnnnnnnnnnnnnnnnnnnnnnnnnnnnnnnnnnnnnnnnnnnnnnnnnnnnnnnnnnnnnnnnnnnnnnnnnnnnnnnnnnnnnnnnnnnnnnnnnnnnnnnnnnnnnnnnnnnnnnnnnnnnnnnnnnnnnnnnnnnnnnnnnnnnnnnnnnnnnnnnnnnnnnnnnnnnnnnnnnnnnnnnnnnnnnnnnnnnnnnnnnnnnnnnnnnnnnnnnnnnnnnnnnnnnnnnnnnnnnnnnnnnnnnnnnnnnnnnnnnnnnnnnnnnnnnnnnnnnnnnnnnnnnnnnnnnnnnnnnnnnnnnnnnnnnnnnnnnnnnnnnnnnnnnnnnnnnnnnnnnnnnnnnnnnnnnnnnnnnnnnnnnnnnnnnnnnnnnnnnnnnnnnnnnnnnnnnnnnnnnnnnnnnnnnnnnnnnnnnnnnnnnnnnnnnnnnnnnnnnnnnnnnnnnnnnnnnnnnnnnnnnnnnnnnnnnnnnnnnnnnnnnnnnnnnnnnnnnnnnnnnnnnnnnnnnnnnnnnnnnnnnnnnnnnnnnnnnnnnnnnnnnnnnnnnnnnnnnnnnnnnnnnnnnnnnnnnnnnnnnnnnnnnnnnnnnnnnnnnnnnnnnnnnnnnnnnnnnnnnnnnnnnnnnnnnnnnnnnnnnnnnnnnnnnnnnnnnnnnnnnnnnnnnnnnnnnnnnnnnnnnnnnnnnnnnnnnnnnnnnnnnnnnnnnnnnnnnnnnnnnnnnnnnnnnnnnnnnnnnnnnnnnnnnnnnnnnnnnnnnnnnnnnnnnnnnnnnnnnnnnnnnnnnnnnnnnnnnnnnnnnnnnnnnnnnnnnnnnnnnnnnnnnnnnnnnnnnnnnnnnnnnnnnnnnnnnnnnnnnnnnnnnnnnnnnnnnnnnnnnnnnnnnnnnnnnnnnnnnnnnnnnnnnnnnnnnnnnnnnnnnnnnnnnnnnnnnnnnnnnnnnnnnnnnnnnnnnnnnnnnnnnnnnnnnnnnnnnnnnnnnnnnnnnnnnnnnnnnnnnnnnnnnnnnnnnnnnnnnnnnnnnnnnnnnnnnnnnnnnnnnnnnnnnnnnnnnnnnnnnnnnnnnnnnnnnnnnnnnnnnnnnnnnnnnnnnnnnnnnnnnnnnnnnnnnnnnnnnnnnnnnnnnnnnnnnnnnnnnnnnnnnnnnnnnnnnnnnnnnnnnnnnnnnnnnnnnnnnnnnnnnnnnnnnnnnnnnnnnnnnnnnnnnnnnnnnnnnnnnnnnnnnnnnnnnnnnnnnnnnnnnnnnnnnnnnnnnnnnnnnnnnnnnnnnnnnnnnnnnnnnnnnnnnnnnnnnnnnnnnnnnnnnnnnnnnnnnnnnnnnnnnnnnnnnnnnnnnnnnnnnnnnnnnnnnnnnnnnnnnnnnnnnnnnnnnnnnnnnnnnnnnnnnnnnnnnnnnnnnnnnnnnnnnnnnnnnnnnnnnnnnnnnnnnnnnnnnnnnnnnnnnnnnnnnnnnnnnnnnnnnnnnnnnnnnnnnnnnnnnnnnnnnnnnnnnnnnnnnnnnnnnnnnnnnnnnnnnnnnnnnnnnnnnnnnnnnnnnnnnnnnnnnnnnnnnnnnnnnnnnnnnnnnnnnnnnnnnnnnnnnnnnnnnnnnnnnnnnnnnnnnnnnnnnnnnnnnnnnnnnnnnnnnnnnnnnnnnnnnnnnnnnnnnnnnnnnnnnnnnnnnnnnnnnnnnnnnnnnnnnnnnnnnnnnnnnnnnnnnnnnnnnnnnnnnnnnnnnnnnnnnnnnnnnnnnnnnnnnnnnnnnnnnnnnnnnnnnnnnnnnnnnnnnnnnnnnnnnnnnnnnnnnnnnnnnnnnnnnnnnnnnnnnnnnnnnnnnnnnnnnnnnnnnnnnnnnnnnnnnnnnnnnnnnnnnnnnnnnnnnnnnnnnnnnnnnnnnnnnnnnnnnnnnnnnnnnnnnnnnnnnnnnnnnnnnnnnnnnnnnnnnnnnnnnnnnnnnnnnnnnnnnnnnnnnnnnnnnnnnnnnnnnnnnnnnnnnnnnnnnnnnnnnnnnnnnnnnnnnnnnnnnnnnnnnnnnnnnnnnnnnnnnnnnnnnnnnnnnnnnnnnnnnnnnnnnnnnnnnnnnnnnnnnnnnnnnnnnnnnnnnnnnnnnnnnnnnnnnnnnnnnnnnnnnnnnnnnnnnnnnnnnnnnnnnnnnnnnnnnnnnnnnnnnnnnnnnnnnnnnnnnnnnnnnnnnnnnnnnnnnnnnnnnnnnnnnnnnnnnnnnnnnnnnnnnnnnnnnnnnnnnnnnnnnnnnnnnnnnnnnnnnnnnnnnnnnnnnnnnnnnnnnnnnnnnnnnnnnnnnnnnnnnnnnnnnnnnnnnnnnnnnnnnnnnnnnnnnnnnnnnnnnnnnnnnnnnnnnnnnnnnnnnnnnnnnnnnnnnnnnnnnnnnnnnnnnnnnnnnnnnnnnnnnnnnnnnnnnnnnnnnnnnnnnnnnnnnnnnnnnnnnnnnnnnnnnnnnnnnnnnnnnnnnnnnnnnnnnnnnnnnnnnnnnnnnnnnnnnnnnnnnnnnnnnnnnnnnnnnnnnnnnnnnnnnnnnnnnnnnnnnnnnnnnnnnnnnnnnnnnnnnnnnnnnnnnnnnnnnnnnnnnnnnnnnnnnnnnnnnnnnnnnnnnnnnnnnnnnnnnnnnnnnnnnnnnnnnnnnnnnnnnnnnnnnnnnnnnnnnnnnnnnnnnnnnnnnnnnnnnnnnnnnnnnnnnnnnnnnnnnnnnnnnnnnnnnnnnnnnnnnnnnnnnnnnnnnnnnnnnnnnnnnnnnnnnnnnnnnnnnnnnnnnnnnnnnnnnnnnnnnnnnnnnnnnnnnnnnnnnnnnnnnnnnnnnnnnnnnnnnnnnnnnnnnnnnnnnnnnnnnnnnnnnnnnnnnnnnnnnnnnnnnnnnnnnnnnnnnnnnnnnnnnnnnnnnnnnnnnnnnnnnnnnnnnnnnnnnnnnnnnnnnnnnnnnnnnnnnnnnnnnnnnnnnnnnnnnnnnnnnnnnnnnnnnnnnnnnnnnnnnnnnnnnnnnnnnnnnnnnnnnnnnnnnnnnnnnnnnnnnnnnnnnnnnnnnnnnnnnnnnnnnnnnnnnnnnnnnnnnnnnnnnnnnnnnnnnnnnnnnnnnnnnnnnnnnnnnnnnnnnnnnnnnnnnnnnnnnnnnnnnnnnnnnnnnnnnnnnnnnnnnnnnnnnnnnnnnnnnnnnnnnnnnnnnnnnnnnnnnnnnnnnnnnnnnnnnnnnnnnnnnnnnnnnnnnnnnnnnnnnnnnnnnnnnnnnnnnnnnnnnnnnnnnnnnnnnnnnnnnnnnnnnnnnnnnnnnnnnnnnnnnnnnnnnnnnnnnnnnnnnnnnnnnnnnnnnnnnnnnnnnnnnnnnnnnnnnnnnnnnnnnnnnnnnnnnnnnnnnnnnnnnnnnnnnnnnnnnnnnnnnnnnnnnnnnnnnnnnnnnnnnnnnnnnnnnnnnnnnnnnnnnnnnnnnnnnnnnnnnnnnnnnnnnnnnnnnnnnnnnnnnnnnnnnnnnnnnnnnnnnnnnnnnnnnnnnnnnnnnnnnnnnnnnnnnnnnnnnnnnnnnnnnnnnnnnnnnnnnnnnnnnnnnnnnnnnnnnnnnnnnnnnnnnnnnnnnnnnnnnnnnnnnnnnnnnnnnnnnnnnnnnnnnnnnnnnnnnnnnnnnnnnnnnnnnnnnnnnnnnnnnnnnnnnnnnnnnnnnnnnnnnnnnnnnnnnnnnnnnnnnnnnnnnnnnnnnnnnnnnnnnnnnnnnnnnnnnnnnnnnnnnnnnnnnnnnnnnnnnnnnnnnnnnnnnnnnnnnnnnnnnnnnnnnnnnnnnnnnnnnnnnnnnnnnnnnnnnnnnnnnnnnnnnnnnnnnnnnnnnnnnnnnnnnnnnnnnnnnnnnnnnnnnnnnnnnnnnnnnnnnnnnnnnnnnnnnnnnnnnnnnnnnnnnnnnnnnnnnnnnnnnnnnnnnnnnnnnnnnnnnnnnnnnnnnnnnnnnnnnnnnnnnnnnnnnnnnnnnnnnnnnnnnnnnnnnnnnnnnnnnnnnnnnnnnnnnnnnnnnnnnnnnnnnnnnnnnnnnnnnnnnnnnnnnnnnnnnnnnnnnnnnnnnnnnnnnnnnnnnnnnnnnnnnnnnnnnnnnnnnnnnnnnnnnnnnnnnnnnnnnnnnnnnnnnnnnnnnnnnnnnnnnnnnnnnnnnnnnnnnnnnnnnnnnnnnnnnnnnnnnnnnnnnnnnnnnnnnnnnnnnnnnnnnnnnnnnnnnnnnnnnnnnnnnnnnnnnnnnnnnnnnnnnnnnnnnnnnnnnnnnnnnnnnnnnnnnnnnnnnnnnnnnnnnnnnnnnnnnnnnnnnnnnnnnnnnnnnnnnnnnnnnnnnnnnnnnnnnnnnnnnnnnnnnnnnnnnnnnnnnnnnnnnnnnnnnnnnnnnnnnnnnnnnnnnnnnnnnnnnnnnnnnnnnnnnnnnnnnnnnnnnnnnnnnnnnnnnnnnnnnnnnnnnnnnnnnnnnnnnnnnnnnnnnnnnnnnnnnnnnnnnnnnnnnnnnnnnnnnnnnnnnnnnnnnnnnnnnnnnnnnnnnnnnnnnnnnnnnnnnnnnnnnnnnnnnnnnnnnnnnnnnnnnnnnnnnnnnnnnnnnnnnnnnnnnnnnnnnnnnnnnnnnnnnnnnnnnnnnnnnnnnnnnnnnnnnnnnnnnnnnnnnnnnnnnnnnnnnnnnnnnnnnnnnnnnnnnnnnnnnnnnnnnnnnnnnnnnnnnnnnnnnnnnnnnnnnnnnnnnnnnnnnnnnnnnnnnnnnnnnnnnnnnnnnnnnnnnnnnnnnnnnnnnnnnnnnnnnnnnnnnnnnnnnnnnnnnnnnnnnnnnnnnnnnnnnnnnnnnnnnnnnnnnnnnnnnnnnnnnnnnnnnnnnnnnnnnnnnnnnnnnnnnnnnnnnnnnnnnnnnnnnnnnnnnnnnnnnnnnnnnnnnnnnnnnnnnnnnnnnnnnnnnnnnnnnnnnnnnnnnnnnnnnnnnnnnnnnnnnnnnnnnnnnnnnnnnnnnnnnnnnnnnnnnnnnnnnnnnnnnnnnnnnnnnnnnnnnnnnnnnnnnnnnnnnnnnnnnnnnnnnnnnnnnnnnnnnnnnnnnnnnnnnnnnnnnnnnnnnnnnnnnnnnnnnnnnnnnnnnnnnnnnnnnnnnnnnnnnnnnnnnnnnnnnnnnnnnnnnnnnnnnnnnnnnnnnnnnnnnnnnnnnnnnnnnnnnnnnnnnnnnnnnnnnnnnnnnnnnnnnnnnnnnnnnnnnnnnnnnnnnnnnnnnnnnnnnnnnnnnnnnnnnnnnnnnnnnnnnnnnnnnnnnnnnnnnnnnnnnnnnnnnnnnnnnnnnnnnnnnnnnnnnnnnnnnnnnnnnnnnnnnnnnnnnnnnnnnnnnnnnnnnnnnnnnnnnnnnnnnnnnnnnnnnnnnnnnnnnnnnnnnnnnnnnnnnnnnnnnnnnnnnnnnnnnnnnnnnnnnnnnnnnnnnnnnnnnnnnnnnnnnnnnnnnnnnnnnnnnnnnnnnnnnnnnnnnnnnnnnnnnnnnnnnnnnnnnnnnnnnnnnnnnnnnnnnnnnnnnnnnnnnnnnnnnnnnnnnnnnnnnnnnnnnnnnnnnnnnnnnnnnnnnnnnnnnnnnnnnnnnnnnnnnnnnnnnnnnnnnnnnnnnnnnnnnnnnnnnnnnnnnnnnnnnnnnnnnnnnnnnnnnnnnnnnnnnnnnnnnnnnnnnnnnnnnnnnnnnnnnnnnnnnnnnnnnnnnnnnnnnnnnnnnnnnnnnnnnnnnnnnnnnnnnnnnnnnnnnnnnnnnnnnnnnnnnnnnnnnnnnnnnnnnnnnnnnnnnnnnnnnnnnnnnnnnnnnnnnnnnnnnnnnnnnnnnnnnnnnnnnnnnnnnnnnnnnnnnnnnnnnnnnnnnnnnnnnnnnnnnnnnnnnnnnnnnnnnnnnnnnnnnnnnnnnnnnnnnnnnnnnnnnnnnnnnnnnnnnnnnnnnnnnnnnnnnnnnnnnnnnnnnnnnnnnnnnnnnnnnnnnnnnnnnnnnnnnnnnnnnnnnnnnnnnnnnnnnnnnnnnnnnnnnnnnnnnnnnnnnnnnnnnnnnnnnnnnnnnnnnnnnnnnnnnnnnnnnnnnnnnnnnnnnnnnnnnnnnnnnnnnnnnnnnnnnnnnnnnnnnnnnnnnnnnnnnnnnnnnnnnnnnnnnnnnnnnnnnnnnnnnnnnnnnnnnnnnnnnnnnnnnnnnnnnnnnnnnnnnnnnnnnnnnnnnnnnnnnnnnnnnnnnnnnnnnnnnnnnnnnnnnnnnnnnnnnnnnnnnnnnnnnnnnnnnnnnnnnnnnnnnnnnnnnnnnnnnnnnnnnnnnnnnnnnnnnnnnnnnnnnnnnnnnnnnnnnnnnnnnnnnnnnnnnnnnnnnnnnnnnnnnnnnnnnnnnnnnnnnnnnnnnnnnnnnnnnnnnnnnnnnnnnnnnnnnnnnnnnnnnnnnnnnnnnnnnnnnnnnnnnnnnnnnnnnnnnnnnnnnnnnnnnnnnnnnnnnnnnnnnnnnnnnnnnnnnnnnnnnnnnnnnnnnnnnnnnnnnnnnnnnnnnnnnnnnnnnnnnnnnnnnnnnnnnnnnnnnnnnnnnnnnnnnnnnnnnnnnnnnnnnnnnnnnnnnnnnnnnnnnnnnnnnnnnnnnnnnnnnnnnnnnnnnnnnnnnnnnnnnnnnnnnnnnnnnnnnnnnnnnnnnnnnnnnnnnnnnnnnnnnnnnnnnnnnnnnnnnnnnnnnnnnnnnnnnnnnnnnnnnnnnnnnnnnnnnnnnnnnnnnnnnnnnnnnnnnnnnnnnnnnnnnnnnnnnnnnnnnnnnnnnnnnnnnnnnnnnnnnnnnnnnnnnnnnnnnnnnnnnnnnnnnnnnnnnnnnnnnnnnnnnnnnnnnnnnnnnnnnnnnnnnnnnnnnnnnnnnnnnnnnnnnnnnnnnnnnnnnnnnnnnnnnnnnnnnnnnnnnnnnnnnnnnnnnnnnnnnnnnnnnnnnnnnnnnnnnnnnnnnnnnnnnnnnnnnnnnnnnnnnnnnnnnnnnnnnnnnnnnnnnnnnnnnnnnnnnnnnnnnnnnnnnnnnnnnnnnnnnnnnnnnnnnnnnnnnnnnnnnnnnnnnnnnnnnnnnnnnnnnnnnnnnnnnnnnnnnnnnnnnnnnnnnnnnnnnnnnnnnnnnnnnnnnnnnnnnnnnnnnnnnnnnnnnnnnnnnnnnnnnnnnnnnnnnnnnnnnnnnnnnnnnnnnnnnnnnnnnnnnnnnnnnnnnnnnnnnnnnnnnnnnnnnnnnnnnnnnnnnnnnnnnnnnnnnnnnnnnnnnnnnnnnnnnnnnnnnnnnnnnnnnnnnnnnnnnnnnnnnnnnnnnnnnnnnnnnnnnnnnnnnnnnnnnnnnnnnnnnnnnnnnnnnnnnnnnnnnnnnnnnnnnnnnnnnnnnnnnnnnnnnnnnnnnnnnnnnnnnnnnnnnnnnnnnnnnnnnnnnnnnnnnnnnnnnnnnnnnnnnnnnnnnnnnnnnnnnnnnnnnnnnnnnnnnnnnnnnnnnnnnnnnnnnnnnnnnnnnnnnnnnnnnnnnnnnnnnnnnnnnnnnnnnnnnnnnnnnnnnnnnnnnnnnnnnnnnnnnnnnnnnnnnnnnnnnnnnnnnnnnnnnnnnnnnnnnnnnnnnnnnnnnnnnnnnnnnnnnnnnnnnnnnnnnnnnnnnnnnnnnnnnnnnnnnnnnnnnnnnnnnnnnnnnnnnnnnnnnnnnnnnnnnnnnnnnnnnnnnnnnnnnnnnnnnnnnnnnnnnnnnnnnnnnnnnnnnnnnnnnnnnnnnnnnnnnnnnnnnnnnnnnnnnnnnnnnnnnnnnnnnnnnnnnnnnnnnnnnnnnnnnnnnnnnnnnnnnnnnnnnnnnnnnnnnnnnnnnnnnnnnnnnnnnnnnnnnnnnnnnnnnnnnnnnnnnnnnnnnnnnnnnnnnnnnnnnnnnnnnnnnnnnnnnnnnnnnnnnnnnnnnnnnnnnnnnnnnnnnnnnnnnnnnnnnnnnnnnnnnnnnnnnnnnnnnnnnnnnnnnnnnnnnnnnnnnnnnnnnnnnnnnnnnnnnnnnnnnnnnnnnnnnnnnnnnnnnnnnnnnnnnnnnnnnnnnnnnnnnnnnnnnnnnnnnnnnnnnnnnnnnnnnnnnnnnnnnnnnnnnnnnnnnnnnnnnnnnnnnnnnnnnnnnnnnnnnnnnnnnnnnnnnnnnnnnnnnnnnnnnnnnnnnnnnnnnnnnnnnnnnnnnnnnnnnnnnnnnnnnnnnnnnnnnnnnnnnnnnnnnnnnnnnnnnnnnnnnnnnnnnnnnnnnnnnnnnnnnnnnnnnnnnnnnnnnnnnnnnnnnnnnnnnnnnnnnnnnnnnnnnnnnnnnnnnnnnnnnnnnnnnnnnnnnnnnnnnnnnnnnnnnnnnnnnnnnnnnnnnnnnnnnnnnnnnnnnnnnnnnnnnnnnnnnnnnnnnnnnnnnnnnnnnnnnnnnnnnnnnnnnnnnnnnnnnnnnnnnnnnnnnnnnnnnnnnnnnnnnnnnnnnnnnnnnnnnnnnnnnnnnnnnnnnnnnnnnnnnnnnnnnnnnnnnnnnnnnnnnnnnnnnnnnnnnnnnnnnnnnnnnnnnnnnnnnnnnnnnnnnnnnnnnnnnnnnnnnnnnnnnnnnnnnnnnnnnnnnnnnnnnnnnnnnnnnnnnnnnnnnnnnnnnnnnnnnnnnnnnnnnnnnnnnnnnnnnnnnnnnnnnnnnnnnnnnnnnnnnnnnnnnnnnnnnnnnnnnnnnnnnnnnnnnnnnnnnnnnnnnnnnnnnnnnnnnnnnnnnnnnnnnnnnnnnnnnnnnnnnnnnnnnnnnnnnnnnnnnnnnnnnnnnnnnnnnnnnnnnnnnnnnnnnnnnnnnnnnnnnnnnnnnnnnnnnnnnnnnnnnnnnnnnnnnnnnnnnnnnnnnnnnnnnnnnnnnnnnnnnnnnnnnnnnnnnnnnnnnnnnnnnnnnnnnnnnnnnnnnnnnnnnnnnnnnnnnnnnnnnnnnnnnnnnnnnnnnnnnnnnnnnnnnnnnnnnnnnnnnnnnnnnnnnnnnnnnnnnnnnnnnnnnnnnnnnnnnnnnnnnnnnnnnnnnnnnnnnnnnnnnnnnnnnnnnnnnnnnnnnnnnnnnnnnnnnnnnnnnnnnnnnnnnnnnnnnnnnnnnnnnnnnnnnnnnnnnnnnnnnnnnnnnnnnnnnnnnnnnnnnnnnnnnnnnnnnnnnnnnnnnnnnnnnnnnnnnnnnnnnnnnnnnnnnnnnnnnnnnnnnnnnnnnnnnnnnnnnnnnnnnnnnnnnnnnnnnnnnnnnnnnnnnnnnnnnnnnnnnnnnnnnnnnnnnnnnnnnnnnnnnnnnnnnnnnnnnnnnnnnnnnnnnnnnnnnnnnnnnnnnnnnnnnnnnnnnnnnnnnnnnnnnnnnnnnnnnnnnnnnnnnnnnnnnnnnnnnnnnnnnnnnnnnnnnnnnnnnnnnnnnnnnnnnnnnnnnnnnnnnnnnnnnnnnnnnnnnnnnnnnnnnnnnnnnnnnnnnnnnnnnnnnnnnnnnnnnnnnnnnnnnnnnnnnnnnnnnnnnnnnnnnnnnnnnnnnnnnnnnnnnnnnnnnnnnnnnnnnnnnnnnnnnnnnnnnnnnnnnnnnnnnnnnnnnnnnnnnnnnnnnnnnnnnnnnnnnnnnnnnnnnnnnnnnnnnnnnnnnnnnnnnnnnnnnnnnnnnnnnnnnnnnnnnnnnnnnnnnnnnnnnnnnnnnnnnnnnnnnnnnnnnnnnnnnnnnnnnnnnnnnnnnnnnnnnnnnnnnnnnnnnnnnnnnnnnnnnnnnnnnnnnnnnnnnnnnnnnnnnnnnnnnnnnnnnnnnnnnnnnnnnnnnnnnnnnnnnnnnnnnnnnnnnnnnnnnnnnnnnnnnnnnnnnnnnnnnnnnnnnnnnnnnnnnnnnnnnnnnnnnnnnnnnnnnnnnnnnnnnnnnnnnnnnnnnnnnnnnnnnnnnnnnnnnnnnnnnnnnnnnnnnnnnnnnnnnnnnnnnnnnnnnnnnnnnnnnnnnnnnnnnnnnnnnnnnnnnnnnnnnnnnnnnnnnnnnnnnnnnnnnnnnnnnnnnnnnnnnnnnnnnnnnnnnnnnnnnnnnnnnnnnnnnnnnnnnnnnnnnnnnnnnnnnnnnnnnnnnnnnnnnnnnnnnnnnnnnnnnnnnnnnnnnnnnnnnnnnnnnnnnnnnnnnnnnnnnnnnnnnnnnnnnnnnnnnnnnnnnnnnnnnnnnnnnnnnnnnnnnnnnnnnnnnnnnnnnnnnnnnnnnnnnnnnnnnnnnnnnnnnnnnnnnnnnnnnnnnnnnnnnnnnnnnnnnnnnnnnnnnnnnnnnnnnnnnnnnnnnnnnnnnnnnnnnnnnnnnnnnnnnnnnnnnnnnnnnnnnnnnnnnnnnnnnnnnnnnnnnnnnnnnnnnnnnnnnnnnnnnnnnnnnnnnnnnnnnnnnnnnnnnnnnnnnnnnnnnnnnnnnnnnnnnnnnnnnnnnnnnnnnnnnnnnnnnnnnnnnnnnnnnnnnnnnnnnnnnnnnnnnnnnnnnnnnnnnnnnnnnnnnnnnnnnnnnnnnnnnnnnnnnnnnnnnnnnnnnnnnnnnnnnnnnnnnnnnnnnnnnnnnnnnnnnnnnnnnnnnnnnnnnnnnnnnnnnnnnnnnnnnnnnnnnnnnnnnnnnnnnnnnnnnnnnnnnnnnnnnnnnnnnnnnnnnnnnnnnnnnnnnnnnnnnnnnnnnnnnnnnnnnnnnnnnnnnnnnnnnnnnnnnnnnnnnnnnnnnnnnnnnnnnnnnnnnnnnnnnnnnnnnnnnnnnnnnnnnnnnnnnnnnnnnnnnnnnnnnnnnnnnnnnnnnnnnnnnnnnnnnnnnnnnnnnnnnnnnnnnnnnnnnnnnnnnnnnnnnnnnnnnnnnnnnnnnnnnnnnnnnnnnnnnnnnnnnnnnnnnnnnnnnnnnnnnnnnnnnnnnnnnnnnnnnnnnnnnnnnnnnnnnnnnnnnnnnnnnnnnnnnnnnnnnnnnnnnnnnnnnnnnnnnnnnnnnnnnnnnnnnnnnnnnnnnnnnnnnnnnnnnnnnnnnnnnnnnnnnnnnnnnnnnnnnnnnnnnnnnnnnnnnnnnnnnnnnnnnnnnnnnnnnnnnnnnnnnnnnnnnnnnnnnnnnnnnnnnnnnnnnnnnnnnnnnnnnnnnnnnnnnnnnnnnnnnnnnnnnnnnnnnnnnnnnnnnnnnnnnnnnnnnnnnnnnnnnnnnnnnnnnnnnnnnnnnnnnnnnnnnnnnnnnnnnnnnnnnnnnnnnnnnnnnnnnnnnnnnnnnnnnnnnnnnnnnnnnnnnnnnnnnnnnnnnnnnnnnnnnnnnnnnnnnnnnnnnnnnnnnnnnnnnnnnnnnnnnnnnnnnnnnnnnnnnnnnnnnnnnnnnnnnnnnnnnnnnnnnnnnnnnnnnnnnnnnnnnnnnnnnnnnnnnnnnnnnnnnnnnnnnnnnnnnnnnnnnnnnnnnnnnnnnnnnnnnnnnnnnnnnnnnnnnnnnnnnnnnnnnnnnnnnnnnnnnnnnnnnnnnnnnnnnnnnnnnnnnnnnnnnnnnnnnnnnnnnnnnnnnnnnnnnnnnnnnnnnnnnnnnnnnnnnnnnnnnnnnnnnnnnnnnnnnnnnnnnnnnnnnnnnnnnnnnnnnnnnnnnnnnnnnnnnnnnnnnnnnnnnnnnnnnnnnnnnnnnnnnnnnnnnnnnnnnnnnnnnnnnnnnnnnnnnnnnnnnnnnnnnnnnnnnnnnnnnnnnnnnnnnnnnnnnnnnnnnnnnnnnnnnnnnnnnnnnnnnnnnnnnnnnnnnnnnnnnnnnnnnnnnnnnnnnnnnnnnnnnnnnnnnnnnnnnnnnnnnnnnnnnnnnnnnnnnnnnnnnnnnnnnnnnnnnnnnnnnnnnnnnnnnnnnnnnnnnnnnnnnnnnnnnnnnnnnnnnnnnnnnnnnnnnnnnnnnnnnnnnnnnnnnnnnnnnnnnnnnnnnnnnnnnnnnnnnnnnnnnnnnnnnnnnnnnnnnnnnnnnnnnnnnnnnnnnnnnnnnnnnnnnnnnnnnnnnnnnnnnnnnnnnnnnnnnnnnnnnnnnnnnnnnnnnnnnnnnnnnnnnnnnnnnnnnnnnnnnnnnnnnnnnnnnnnnnnnnnnnnnnnnnnnnnnnnnnnnnnnnnnnnnnnnnnnnnnnnnnnnnnnnnnnnnnnnnnnnnnnnnnnnnnnnnnnnnnnnnnnnnnnnnnnnnnnnnnnnnnnnnnnnnnnnnnnnnnnnnnnnnnnnnnnnnnnnnnnnnnnnnnnnnnnnnnnnnnnnnnnnnnnnnnnnnnnnnnnnnnnnnnnnnnnnnnnnnnnnnnnnnnnnnnnnnnnnnnnnnnnnnnnnnnnnnnnnnnnnnnnnnnnnnnnnnnnnnnnnnnnnnnnnnnnnnnnnnnnnnnnnnnnnnnnnnnnnnnnnnnnnnnnnnnnnnnnnnnnnnnnnnnnnnnnnnnnnnnnnnnnnnnnnnnnnnnnnnnnnnnnnnnnnnnnnnnnnnnnnnnnnnnnnnnnnnnnnnnnnnnnnnnnnnnnnnnnnnnnnnnnnnnnnnnnnnnnnnnnnnnnnnnnnnnnnnnnnnnnnnnnnnnnnnnnnnnnnnnnnnnnnnnnnnnnnnnnnnnnnnnnnnnnnnnnnnnnnnnnnnnnnnnnnnnnnnnnnnnnnnnnnnnnnnnnnnnnnnnnnnnnnnnnnnnnnnnnnnnnnnnnnnnnnnnnnnnnnnnnnnnnnnnnnnnnnnnnnnnnnnnnnnnnnnnnnnnnnnnnnnnnnnnnnnnnnnnnnnnnnnnnnnnnnnnnnnnnnnnnnnnnnnnnnnnnnnnnnnnnnnnnnnnnnnnnnnnnnnnnnnnnnnnnnnnnnnnnnnnnnnnnnnnnnnnnnnnnnnnnnnnnnnnnnnnnnnnnnnnnnnnnnnnnnnnnnnnnnnnnnnnnnnnnnnnnnnnnnnnnnnnnnnnnnnnnnnnnnnnnnnnnnnnnnnnnnnnnnnnnnnnnnnnnnnnnnnnnnnnnnnnnnnnnnnnnnnnnnnnnnnnnnnnnnnnnnnnnnnnnnnnnnnnnnnnnnnnnnnnnnnnnnnnnnnnnnnnnnnnnnnnnnnnnnnnnnnnnnnnnnnnnnnnnnnnnnnnnnnnnnnnnnnnnnnnnnnnnnnnnnnnnnnnnnnnnnnnnnnnnnnnnnnnnnnnnnnnnnnnnnnnnnnnnnnnnnnnnnnnnnnnnnnnnnnnnnnnnnnnnnnnnnnnnnnnnnnnnnnnnnnnnnnnnnnnnnnnnnnnnnnnnnnnnnnnnnnnnnnnnnnnnnnnnnnnnnnnnnnnnnnnnnnnnnnnnnnnnnnnnnnnnnnnnnnnnnnnnnnnnnnnnnnnnnnnnnnnnnnnnnnnnnnnnnnnnnnnnnnnnnnnnnnnnnnnnnnnnnnnnnnnnnnnnnnnnnnnnnnnnnnnnnnnnnnnnnnnnnnnnnnnnnnnnnnnnnnnnnnnnnnnnnnnnnnnnnnnnnnnnnnnnnnnnnnnnnnnnnnnnnnnnnnnnnnnnnnnnnnnnnnnnnnnnnnnnnnnnnnnnnnnnnnnnnnnnnnnnnnnnnnnnnnnnnnnnnnnnnnnnnnnnnnnnnnnnnnnnnnnnnnnnnnnnnnnnnnnnnnnnnnnnnnnnnnnnnnnnnnnnnnnnnnnnnnnnnnnnnnnnnnnnnnnnnnnnnnnnnnnnnnnnnnnnnnnnnnnnnnnnnnnnnnnnnnnnnnnnnnnnnnnnnnnnnnnnnnnnnnnnnnnnnnnnnnnnnnnnnnnnnnnnnnnnnnnnnnnnnnnnnnnnnnnnnnnnnnnnnnnnnnnnnnnnnnnnnnnnnnnnnnnnnnnnnnnnnnnnnnnnnnnnnnnnnnnnnnnnnnnnnnnnnnnnnnnnnnnnnnnnnnnnnnnnnnnnnnnnnnnnnnnnnnnnnnnnnnnnnnnnnnnnnnnnnnnnnnnnnnnnnnnnnnnnnnnnnnnnnnnnnnnnnnnnnnnnnnnnnnnnnnnnnnnnnnnnnnnnnnnnnnnnnnnnnnnnnnnnnnnnnnnnnnnnnnnnnnnnnnnnnnnnnnnnnnnnnnnnnnnnnnnnnnnnnnnnnnnnnnnnnnnnnnnnnnnnnnnnnnnnnnnnnnnnnnnnnnnnnnnnnnnnnnnnnnnnnnnnnnnnnnnnnnnnnnnnnnnnnnnnnnnnnnnnnnnnnnnnnnnnnnnnnnnnnnnnnnnnnnnnnnnnnnnnnnnnnnnnnnnnnnnnnnnnnnnnnnnnnnnnnnnnnnnnnnnnnnnnnnnnnnnnnnnnnnnnnnnnnnnnnnnnnnnnnnnnnnnnnnnnnnnnnnnnnnnnnnnnnnnnnnnnnnnnnnnnnnnnnnnnnnnnnnnnnnnnnnnnnnnnnnnnnnnnnnnnnnnnnnnnnnnnnnnnnnnnnnnnnnnnnnnnnnnnnnnnnnnnnnnnnnnnnnnnnnnnnnnnnnnnnnnnnnnnnnnnnnnnnnnnnnnnnnnnnnnnnnnnnnnnnnnnnnnnnnnnnnnnnnnnnnnnnnnnnnnnnnnnnnnnnnnnnnnnnnnnnnnnnnnnnnnnnnnnnnnnnnnnnnnnnnnnnnnnnnnnnnnnnnnnnnnnnnnnnnnnnnnnnnnnnnnnnnnnnnnnnnnnnnnnnnnnnnnnnnnnnnnnnnnnnnnnnnnnnnnnnnnnnnnnnnnnnnnnnnnnnnnnnnnnnnnnnnnnnnnnnnnnnnnnnnnnnnnnnnnnnnnnnnnnnnnnnnnnnnnnnnnnnnnnnnnnnnnnnnnnnnnnnnnnnnnnnnnnnnnnnnnnnnnnnnnnnnnnnnnnnnnnnnnnnnnnnnnnnnnnnnnnnnnnnnnnnnnnnnnnnnnnnnnnnnnnnnnnnnnnnnnnnnnnnnnnnnnnnnnnnnnnnnnnnnnnnnnnnnnnnnnnnnnnnnnnnnnnnnnnnnnnnnnnnnnnnnnnnnnnnnnnnnnnnnnnnnnnnnnnnnnnnnnnnnnnnnnnnnnnnnnnnnnnnnnnnnnnnnnnnnnnnnnnnnnnnnnnnnnnnnnnnnnnnnnnnnnnnnnnnnnnnnnnnnnnnnnnnnnnnnnnnnnnnnnnnnnnnnnnnnnnnnnnnnnnnnnnnnnnnnnnnnnnnnnnnnnnnnnnnnnnnnnnnnnnnnnnnnnnnnnnnnnnnnnnnnnnnnnnnnnnnnnnnnnnnnnnnnnnnnnnnnnnnnnnnnnnnnnnnnnnnnnnnnnnnnnnnnnnnnnnnnnnnnnnnnnnnnnnnnnnnnnnnnnnnnnnnnnnnnnnnnnnnnnnnnnnnnnnnnnnnnnnnnnnnnnnnnnnnnnnnnnnnnnnnnnnnnnnnnnnnnnnnnnnnnnnnnnnnnnnnnnnnnnnnnnnnnnnnnnnnnnnnnnnnnnnnnnnnnnnnnnnnnnnnnnnnnnnnnnnnnnnnnnnnnnnnnnnnnnnnnnnnnnnnnnnnnnnnnnnnnnnnnnnnnnnnnnnnnnnnnnnnnnnnnnnnnnnnnnnnnnnnnnnnnnnnnnnnnnnnnnnnnnnnnnnnnnnnnnnnnnnnnnnnnnnnnnnnnnnnnnnnnnnnnnnnnnnnnnnnnnnnnnnnnnnnnnnnnnnnnnnnnnnnnnnnnnnnnnnnnnnnnnnnnnnnnnnnnnnnnnnnnnnnnnnnnnnnnnnnnnnnnnnnnnnnnnnnnnnnnnnnnnnnnnnnnnnnnnnnnnnnnnnnnnnnnnnnnnnnnnnnnnnnnnnnnnnnnnnnnnnnnnnnnnnnnnnnnnnnnnnnnnnnnnnnnnnnnnnnnnnnnnnnnnnnnnnnnnnnnnnnnnnnnnnnnnnnnnnnnnnnnnnnnnnnnnnnnnnnnnnnnnnnnnnnnnnnnnnnnnnnnnnnnnnnnnnnnnnnnnnnnnnnnnnnnnnnnnnnnnnnnnnnnnnnnnnnnnnnnnnnnnnnnnnnnnnnnnnnnnnnnnnnnnnnnnnnnnnnnnnnnnnnnnnnnnnnnnnnnnnnnnnnnnnnnnnnnnnnnnnnnnnnnnnnnnnnnnnnnnnnnnnnnnnnnnnnnnnnnnnnnnnnnnnnnnnnnnnnnnnnnnnnnnnnnnnnnnnnnnnnnnnnnnnnnnnnnnnnnnnnnnnnnnnnnnnnnnnnnnnnnnnnnnnnnnnnnnnnnnnnnnnnnnnnnnnnnnnnnnnnnnnnnnnnnnnnnnnnnnnnnnnnnnnnnnnnnnnnnnnnnnnnnnnnnnnnnnnnnnnnnnnnnnnnnnnnnnnnnnnnnnnnnnnnnnnnnnnnnnnnnnnnnnnnnnnnnnnnnnnnnnnnnnnnnnnnnnnnnnnnnnnnnnnnnnnnnnnnnnnnnnnnnnnnnnnnnnnnnnnnnnnnnnnnnnnnnnnnnnnnnnnnnnnnnnnnnnnnnnnnnnnnnnnnnnnnnnnnnnnnnnnnnnnnnnnnnnnnnnnnnnnnnnnnnnnnnnnnnnnnnnnnnnnnnnnnnnnnnnnnnnnnnnnnnnnnnnnnnnnnnnnnnnnnnnnnnnnnnnnnnnnnnnnnnnnnnnnnnnnnnnnnnnnnnnnnnnnnnnnnnnnnnnnnnnnnnnnnnnnnnnnnnnnnnnnnnnnnnnnnnnnnnnnnnnnnnnnnnnnnnnnnnnnnnnnnnnnnnnnnnnnnnnnnnnnnnnnnnnnnnnnnnnnnnnnnnnnnnnnnnnnnnnnnnnnnnnnnnnnnnnnnnnnnnnnnnnnnnnnnnnnnnnnnnnnnnnnnnnnnnnnnnnnnnnnnnnnnnnnnnnnnnnnnnnnnnnnnnnnnnnnnnnnnnnnnnnnnnnnnnnnnnnnnnnnnnnnnnnnnnnnnnnnnnnnnnnnnnnnnnnnnnnnnnnnnnnnnnnnnnnnnnnnnnnnnnnnnnnnnnnnnnnnnnnnnnnnnnnnnnnnnnnnnnnnnnnnnnnnnnnnnnnnnnnnnnnnnnnnnnnnnnnnnnnnnnnnnnnnnnnnnnnnnnnnnnnnnnnnnnnnnnnnnnnnnnnnnnnnnnnnnnnnnnnnnnnnnnnnnnnnnnnnnnnnnnnnnnnnnnnnnnnnnnnnnnnnnnnnnnnnnnnnnnnnnnnnnnnnnnnnnnnnnnnnnnnnnnnnnnnnnnnnnnnnnnnnnnnnnnnnnnnnnnnnnnnnnnnnnnnnnnnnnnnnnnnnnnnnnnnnnnnnnnnnnnnnnnnnnnnnnnnnnnnnnnnnnnnnnnnnnnnnnnnnnnnnnnnnnnnnnnnnnnnnnnnnnnnnnnnnnnnnnnnnnnnnnnnnnnnnnnnnnnnnnnnnnnnnnnnnnnnnnnnnnnnnnnnnnnnnnnnnnnnnnnnnnnnnnnnnnnnnnnnnnnnnnnnnnnnnnnnnnnnnnnnnnnnnnnnnnnnnnnnnnnnnnnnnnnnnnnnnnnnnnnnnnnnnnnnnnnnnnnnnnnnnnnnnnnnnnnnnnnnnnnnnnnnnnnnnnnnnnnnnnnnnnnnnnnnnnnnnnnnnnnnnnnnnnnnnnnnnnnnnnnnnnnnnnnnnnnnnnnnnnnnnnnnnnnnnnnnnnnnnnnnnnnnnnnnnnnnnnnnnnnnnnnnnnnnnnnnnnnnnnnnnnnnnnnnnnnnnnnnnnnnnnnnnnnnnnnnnnnnnnnnnnnnnnnnnnnnnnnnnnnnnnnnnnnnnnnnnnnnnnnnnnnnnnnnnnnnnnnnnnnnnnnnnnnnnnnnnnnnnnnnnnnnnnnnnnnnnnnnnnnnnnnnnnnnnnnnnnnnnnnnnnnnnnnnnnnnnnnnnnnnnnnnnnnnnnnnnnnnnnnnnnnnnnnnnnnnnnnnnnnnnnnnnnnnnnnnnnnnnnnnnnnnnnnnnnnnnnnnnnnnnnnnnnnnnnnnnnnnnnnnnnnnnnnnnnnnnnnnnnnnnnnnnnnnnnnnnnnnnnnnnnnnnnnnnnnnnnnnnnnnnnnnnnnnnnnnnnnnnnnnnnnnnnnnnnnnnnnnnnnnnnnnnnnnnnnnnnnnnnnnnnnnnnnnnnnnnnnnnnnnnnnnnnnnnnnnnnnnnnnnnnnnnnnnnnnnnnnnnnnnnnnnnnnnnnnnnnnnnnnnnnnnnnnnnnnnnnnnnnnnnnnnnnnnnnnnnnnnnnnnnnnnnnnnnnnnnnnnnnnnnnnnnnnnnnnnnnnnnnnnnnnnnnnnnnnnnnnnnnnnnnnnnnnnnnnnnnnnnnnnnnnnnnnnnnnnnnnnnnnnnnnnnnnnnnnnnnnnnnnnnnnnnnnnnnnnnnnnnnnnnnnnnnnnnnnnnnnnnnnnnnnnnnnnnnnnnnnnnnnnnnnnnnnnnnnnnnnnnnnnnnnnnnnnnnnnnnnnnnnnnnnnnnnnnnnnnnnnnnnnnnnnnnnnnnnnnnnnnnnnnnnnnnnnnnnnnnnnnnnnnnnnnnnnnnnnnnnnnnnnnnnnnnnnnnnnnnnnnnnnnnnnnnnnnnnnnnnnnnnnnnnnnnnnnnnnnnnnnnnnnnnnnnnnnnnnnnnnnnnnnnnnnnnnnnnnnnnnnnnnnnnnnnnnnnnnnnnnnnnnnnnnnnnnnnnnnnnnnnnnnnnnnnnnnnnnnnnnnnnnnnnnnnnnnnnnnnnnnnnnnnnnnnnnnnnnnnnnnnnnnnnnnnnnnnnnnnnnnnnnnnnnnnnnnnnnnnnnnnnnnnnnnnnnnnnnnnnnnnnnnnnnnnnnnnnnnnnnnnnnnnnnnnnnnnnnnnnnnnnnnnnnnnnnnnnnnnnnnnnnnnnnnnnnnnnnnnnnnnnnnnnnnnnnnnnnnnnnnnnnnnnnnnnnnnnnnnnnnnnnnnnnnnnnnnnnnnnnnnnnnnnnnnnnnnnnnnnnnnnnnnnnnnnnnnnnnnnnnnnnnnnnnnnnnnnnnnnnnnnnnnnnnnnnnnnnnnnnnnnnnnnnnnnnnnnnnnnnnnnnnnnnnnnnnnnnnnnnnnnnnnnnnnnnnnnnnnnnnnnnnnnnnnnnnnnnnnnnnnnnnnnnnnnnnnnnnnnnnnnnnnnnnnnnnnnnnnnnnnnnnnnnnnnnnnnnnnnnnnnnnnnnnnnnnnnnnnnnnnnnnnnnnnnnnnnnnnnnnnnnnnnnnnnnnnnnnnnnnnnnnnnnnnnnnnnnnnnnnnnnnnnnnnnnnnnnnnnnnnnnnnnnnnnnnnnnnnnnnnnnnnnnnnnnnnnnnnnnnnnnnnnnnnnnnnnnnnnnnnnnnnnnnnnnnnnnnnnnnnnnnnnnnnnnnnnnnnnnnnnnnnnnnnnnnnnnnnnnnnnnnnnnnnnnnnnnnnnnnnnnnnnnnnnnnnnnnnnnnnnnnnnnnnnnnnnnnnnnnnnnnnnnnnnnnnnnnnnnnnnnnnnnnnnnnnnnnnnnnnnnnnnnnnnnnnnnnnnnnnnnnnnnnnnnnnnnnnnnnnnnnnnnnnnnnnnnnnnnnnnnnnnnnnnnnnnnnnnnnnnnnnnnnnnnnnnnnnnnnnnnnnnnnnnnnnnnnnnnnnnnnnnnnnnnnnnnnnnnnnnnnnnnnnnnnnnnnnnnnnnnnnnnnnnnnnnnnnnnnnnnnnnnnnnnnnnnnnnnnnnnnnnnnnnnnnnnnnnnnnnnnnnnnnnnnnnnnnnnnnnnnnnnnnnnnnnnnnnnnnnnnnnnnnnnnnnnnnnnnnnnnnnnnnnnnnnnnnnnnnnnnnnnnnnnnnnnnnnnnnnnnnnnnnnnnnnnnnnnnnnnnnnnnnnnnnnnnnnnnnnnnnnnnnnnnnnnnnnnnnnnnnnnnnnnnnnnnnnnnnnnnnnnnnnnnnnnnnnnnnnnnnnnnnnnnnnnnnnnnnnnnnnnnnnnnnnnnnnnnnnnnnnnnnnnnnnnnnnnnnnnnnnnnnnnnnnnnnnnnnnnnnnnnnnnnnnnnnnnnnnnnnnnnnnnnnnnnnnnnnnnnnnnnnnnnnnnnnnnnnnnnnnnnnnnnnnnnnnnnnnnnnnnnnnnnnnnnnnnnnnnnnnnnnnnnnnnnnnnnnnnnnnnnnnnnnnnnnnnnnnnnnnnnnnnnnnnnnnnnnnnnnnnnnnnnnnnnnnnnnnnnnnnnnnnnnnnnnnnnnnnnnnnnnnnnnnnnnnnnnnnnnnnnnnnnnnnnnnnnnnnnnnnnnnnnnnnnnnnnnnnnnnnnnnnnnnnnnnnnnnnnnnnnnnnnnnnnnnnnnnnnnnnnnnnnnnnnnnnnnnnnnnnnnnnnnnnnnnnnnnnnnnnnnnnnnnnnnnnnnnnnnnnnnnnnnnnnnnnnnnnnnnnnnnnnnnnnnnnnnnnnnnnnnnnnnnnnnnnnnnnnnnnnnnnnnnnnnnnnnnnnnnnnnnnnnnnnnnnnnnnnnnnnnnnnnnnnnnnnnnnnnnnnnnnnnnnnnnnnnnnnnnnnnnnnnnnnnnnnnnnnnnnnnnnnnnnnnnnnnnnnnnnnnnnnnnnnnnnnnnnnnnnnnnnnnnnnnnnnnnnnnnnnnnnnnnnnnnnnnnnnnnnnnnnnnnnnnnnnnnnnnnnnnnnnnnnnnnnnnnnnnnnnnnnnnnnnnnnnnnnnnnnnnnnnnnnnnnnnnnnnnnnnnnnnnnnnnnnnnnnnnnnnnnnnnnnnnnnnnnnnnnnnnnnnnnnnnnnnnnnnnnnnnnnnnnnnnnnnnnnnnnnnnnnnnnnnnnnnnnnnnnnnnnnnnnnnnnnnnnnnnnnnnnnnnnnnnnnnnnnnnnnnnnnnnnnnnnnnnnnnnnnnnnnnnnnnnnnnnnnnnnnnnnnnnnnnnnnnnnnnnnnnnnnnnnnnnnnnnnnnnnnnnnnnnnnnnnnnnnnnnnnnnnnnnnnnnnnnnnnnnnnnnnnnnnnnnnnnnnnnnnnnnnnnnnnnnnnnnnnnnnnnnnnnnnnnnnnnnnnnnnnnnnnnnnnnnnnnnnnnnnnnnnnnnnnnnnnnnnnnnnnnnnnnnnnnnnnnnnnnnnnnnnnnnnnnnnnnnnnnnnnnnnnnnnnnnnnnnnnnnnnnnnnnnnnnnnnnnnnnnnnnnnnnnnnnnnnnnnnnnnnnnnnnnnnnnnnnnnnnnnnnnnnnnnnnnnnnnnnnnnnnnnnnnnnnnnnnnnnnnnnnnnnnnnnnnnnnnnnnnnnnnnnnnnnnnnnnnnnnnnnnnnnnnnnnnnnnnnnnnnnnnnnnnnnnnnnnnnnnnnnnnnnnnnnnnnnnnnnnnnnnnnnnnnnnnnnnnnnnnnnnnnnnnnnnnnnnnnnnnnnnnnnnnnnnnnnnnnnnnnnnnnnnnnnnnnnnnnnnnnnnnnnnnnnnnnnnnnnnnnnnnnnnnnnnnnnnnnnnnnnnnnnnnnnnnnnnnnnnnnnnnnnnnnnnnnnnnnnnnnnnnnnnnnnnnnnnnnnnnnnnnnnnnnnnnnnnnnnnnnnnnnnnnnnnnnnnnnnnnnnnnnnnnnnnnnnnnnnnnnnnnnnnnnnnnnnnnnnnnnnnnnnnnnnnnnnnnnnnnnnnnnnnnnnnnnnnnnnnnnnnnnnnnnnnnnnnnnnnnnnnnnnnnnnnnnnnnnnnnnnnnnnnnnnnnnnnnnnnnnnnnnnnnnnnnnnnnnnnnnnnnnnnnnnnnnnnnnnnnnnnnnnnnnnnnnnnnnnnnnnnnnnnnnnnnnnnnnnnnnnnnnnnnnnnnnnnnnnnnnnnnnnnnnnnnnnnnnnnnnnnnnnnnnnnnnnnnnnnnnnnnnnnnnnnnnnnnnnnnnnnnnnnnnnnnnnnnnnnnnnnnnnnnnnnnnnnnnnnnnnnnnnnnnnnnnnnnnnnnnnnnnnnnnnnnnnnnnnnnnnnnnnnnnnnnnnnnnnnnnnnnnnnnnnnnnnnnnnnnnnnnnnnnnnnnnnnnnnnnnnnnnnnnnnnnnnnnnnnnnnnnnnnnnnnnnnnnnnnnnnnnnnnnnnnnnnnnnnnnnnnnnnnnnnnnnnnnnnnnnnnnnnnnnnnnnnnnnnnnnnnnnnnnnnnnnnnnnnnnnnnnnnnnnnnnnnnnnnnnnnnnnnnnnnnnnnnnnnnnnnnnnnnnnnnnnnnnnnnnnnnnnnnnnnnnnnnnnnnnnnnnnnnnnnnnnnnnnnnnnnnnnnnnnnnnnnnnnnnnnnnnnnnnnnnnnnnnnnnnnnnnnnnnnnnnnnnnnnnnnnnnnnnnnnnnnnnnnnnnnnnnnnnnnnnnnnnnnnnnnnnnnnnnnnnnnnnnnnnnnnnnnnnnnnnnnnnnnnnnnnnnnnnnnnnnnnnnnnnnnnnnnnnnnnnnnnnnnnnnnnnnnnnnnnnnnnnnnnnnnnnnnnnnnnnnnnnnnnnnnnnnnnnnnnnnnnnnnnnnnnnnnnnnnnnnnnnnnnnnnnnnnnnnnnnnnnnnnnnnnnnnnnnnnnnnnnnnnnnnnnnnnnnnnnnnnnnnnnnnnnnnnnnnnnnnnnnnnnnnnnnnnnnnnnnnnnnnnnnnnnnnnnnnnnnnnnnnnnnnnnnnnnnnnnnnnnnnnnnnnnnnnnnnnnnnnnnnnnnnnnnnnnnnnnnnnnnnnnnnnnnnnnnnnnnnnnnnnnnnnnnnnnnnnnnnnnnnnnnnnnnnnnnnnnnnnnnnnnnnnnnnnnnnnnnnnnnnnnnnnnnnnnnnnnnnnnnnnnnnnnnnnnnnnnnnnnnnnnnnnnnnnnnnnnnnnnnnnnnnnnnnnnnnnnnnnnnnnnnnnnnnnnnnnnnnnnnnnnnnnnnnnnnnnnnnnnnnnnnnnnnnnnnnnnnnnnnnnnnnnnnnnnnnnnnnnnnnnnnnnnnnnnnnnnnnnnnnnnnnnnnnnnnnnnnnnnnnnnnnnnnnnnnnnnnnnnnnnnnnnnnnnnnnnnnnnnnnnnnnnnnnnnnnnnnnnnnnnnnnnnnnnnnnnnnnnnnnnnnnnnnnnnnnnnnnnnnnnnnnnnnnnnnnnnnnnnnnnnnnnnnnnnnnnnnnnnnnnnnnnnnnnnnnnnnnnnnnnnnnnnnnnnnnnnnnnnnnnnnnnnnnnnnnnnnnnnnnnnnnnnnnnnnnnnnnnnnnnnnnnnnnnnnnnnnnnnnnnnnnnnnnnnnnnnnnnnnnnnnnnnnnnnnnnnnnnnnnnnnnnnnnnnnnnnnnnnnnnnnnnnnnnnnnnnnnnnnnnnnnnnnnnnnnnnnnnnnnnnnnnnnnnnnnnnnnnnnnnnnnnnnnnnnnnnnnnnnnnnnnnnnnnnnnnnnnnnnnnnnnnnnnnnnnnnnnnnnnnnnnnnnnnnnnnnnnnnnnnnnnnnnnnnnnnnnnnnnnnnnnnnnnnnnnnnnnnnnnnnnnnnnnnnnnnnnnnnnnnnnnnnnnnnnnnnnnnnnnnnnnnnnnnnnnnnnnnnnnnnnnnnnnnnnnnnnnnnnnnnnnnnnnnnnnnnnnnnnnnnnnnnnnnnnnnnnnnnnnnnnnnnnnnnnnnnnnnnnnnnnnnnnnnnnnnnnnnnnnnnnnnnnnnnnnnnnnnnnnnnnnnnnnnnnnnnnnnnnnnnnnnnnnnnnnnnnnnnnnnnnnnnnnnnnnnnnnnnnnnnnnnnnnnnnnnnnnnnnnnnnnnnnnnnnnnnnnnnnnnnnnnnnnnnnnnnnnnnnnnnnnnnnnnnnnnnnnnnnnnnnnnnnnnnnnnnnnnnnnnnnnnnnnnnnnnnnnnnnnnnnnnnnnnnnnnnnnnnnnnnnnnnnnnnnnnnnnnnnnnnnnnnnnnnnnnnnnnnnnnnnnnnnnnnnnnnnnnnnnnnnnnnnnnnnnnnnnnnnnnnnnnnnnnnnnnnnnnnnnnnnnnnnnnnnnnnnnnnnnnnnnnnnnnnnnnnnnnnnnnnnnnnnnnnnnnnnnnnnnnnnnnnnnnnnnnnnnnnnnnnnnnnnnnnnnnnnnnnnnnnnnnnnnnnnnnnnnnnnnnnnnnnnnnnnnnnnnnnnnnnnnnnnnnnnnnnnnnnnnnnnnnnnnnnnnnnnnnnnnnnnnnnnnnnnnnnnnnnnnnnnnnnnnnnnnnnnnnnnnnnnnnnnnnnnnnnnnnnnnnnnnnnnnnnnnnnnnnnnnnnnnnnnnnnnnnnnnnnnnnnnnnnnnnnnnnnnnnnnnnnnnnnnnnnnnnnnnnnnnnnnnnnnnnnnnnnnnnnnnnnnnnnnnnnnnnnnnnnnnnnnnnnnnnnnnnnnnnnnnnnnnnnnnnnnnnnnnnnnnnnnnnnnnnnnnnnnnnnnnnnnnnnnnnnnnnnnnnnnnnnnnnnnnnnnnnnnnnnnnnnnnnnnnnnnnnnnnnnnnnnnnnnnnnnnnnnnnnnnnnnnnnnnnnnnnnnnnnnnnnnnnnnnnnnnnnnnnnnnnnnnnnnnnnnnnnnnnnnnnnnnnnnnnnnnnnnnnnnnnnnnnnnnnnnnnnnnnnnnnnnnnnnnnnnnnnnnnnnnnnnnnnnnnnnnnnnnnnnnnnnnnnnnnnnnnnnnnnnnnnnnnnnnnnnnnnnnnnnnnnnnnnnnnnnnnnnnnnnnnnnnnnnnnnnnnnnnnnnnnnnnnnnnnnnnnnnnnnnnnnnnnnnnnnnnnnnnnnnnnnnnnnnnnnnnnnnnnnnnnnnnnnnnnnnnnnnnnnnnnnnnnnnnnnnnnnnnnnnnnnnnnnnnnnnnnnnnnnnnnnnnnnnnnnnnnnnnnnnnnnnnnnnnnnnnnnnnnnnnnnnnnnnnnnnnnnnnnnnnnnnnnnnnnnnnnnnnnnnnnnnnnnnnnnnnnnnnnnnnnnnnnnnnnnnnnnnnnnnnnnnnnnnnnnnnnnnnnnnnnnnnnnnnnnnnnnnnnnnnnnnnnnnnnnnnnnnnnnnnnnnnnnnnnnnnnnnnnnnnnnnnnnnnnnnnnnnnnnnnnnnnnnnnnnnnnnnnnnnnnnnnnnnnnnnnnnnnnnnnnnnnnnnnnnnnnnnnnnnnnnnnnnnnnnnnnnnnnnnnnnnnnnnnnnnnnnnnnnnnnnnnnnnnnnnnnnnnnnnnnnnnnnnnnnnnnnnnnnnnnnnnnnnnnnnnnnnnnnnnnnnnnnnnnnnnnnnnnnnnnnnnnnnnnnnnnnnnnnnnnnnnnnnnnnnnnnnnnnnnnnnnnnnnnnnnnnnnnnnnnnnnnnnnnnnnnnnnnnnnnnnnnnnnnnnnnnnnnnnnnnnnnnnnnnnnnnnnnnnnnnnnnnnnnnnnnnnnnnnnnnnnnnnnnnnnnnnnnnnnnnnnnnnnnnnnnnnnnnnnnnnnnnnnnnnnnnnnnnnnnnnnnnnnnnnnnnnnnnnnnnnnnnnnnnnnnnnnnnnnnnnnnnnnnnnnnnnnnnnnnnnnnnnnnnnnnnnnnnnnnnnnnnnnnnnnnnnnnnnnnnnnnnnnnnnnnnnnnnnnnnnnnnnnnnnnnnnnnnnnnnnnnnnnnnnnnnnnnnnnnnnnnnnnnnnnnnnnnnnnnnnnnnnnnnnnnnnnnnnnnnnnnnnnnnnnnnnnnnnnnnnnnnnnnnnnnnnnnnnnnnnnnnnnnnnnnnnnnnnnnnnnnnnnnnnnnnnnnnnnnnnnnnnnnnnnnnnnnnnnnnnnnnnnnnnnnnnnnnnnnnnnnnnnnnnnnnnnnnnnnnnnnnnnnnnnnnnnnnnnnnnnnnnnnnnnnnnnnnnnnnnnnnnnnnnnnnnnnnnnnnnnnnnnnnnnnnnnnnnnnnnnnnnnnnnnnnnnnnnnnnnnnnnnnnnnnnnnnnnnnnnnnnnnnnnnnnnnnnnnnnnnnnnnnnnnnnnnnnnnnnnnnnnnnnnnnnnnnnnnnnnnnnnnnnnnnnnnnnnnnnnnnnnnnnnnnnnnnnnnnnnnnnnnnnnnnnnnnnnnnnnnnnnnnnnnnnnnnnnnnnnnnnnnnnnnnnnnnnnnnnnnnnnnnnnnnnnnnnnnnnnnnnnnnnnnnnnnnnnnnnnnnnnnnnnnnnnnnnnnnnnnnnnnnnnnnnnnnnnnnnnnnnnnnnnnnnnnnnnnnnnnnnnnnnnnnnnnnnnnnnnnnnnnnnnnnnnnnnnnnnnnnnnnnnnnnnnnnnnnnnnnnnnnnnnnnnnnnnnnnnnnnnnnnnnnnnnnnnnnnnnnnnnnnnnnnnnnnnnnnnnnnnnnnnnnnnnnnnnnnnnnnnnnnnnnnnnnnnnnnnnnnnnnnnnnnnnnnnnnnnnnnnnnnnnnnnnnnnnnnnnnnnnnnnnnnnnnnnnnnnnnnnnnnnnnnnnnnnnnnnnnnnnnnnnnnnnnnnnnnnnnnnnnnnnnnnnnnnnnnnnnnnnnnnnnnnnnnnnnnnnnnnnnnnnnnnnnnnnnnnnnnnnnnnnnnnnnnnnnnnnnnnnnnnnnnnnnnnnnnnnnnnnnnnnnnnnnnnnnnnnnnnnnnnnnnnnnnnnnnnnnnnnnnnnnnnnnnnnnnnnnnnnnnnnnnnnnnnnnnnnnnnnnnnnnnnnnnnnnnnnnnnnnnnnnnnnnnnnnnnnnnnnnnnnnnnnnnnnnnnnnnnnnnnnnnnnnnnnnnnnnnnnnnnnnnnnnnnnnnnnnnnnnnnnnnnnnnnnnnnnnnnnnnnnnnnnnnnnnnnnnnnnnnnnnnnnnnnnnnnnnnnnnnnnnnnnnnnnnnnnnnnnnnnnnnnnnnnnnnnnnnnnnnnnnnnnnnnnnnnnnnnnnnnnnnnnnnnnnnnnnnnnnnnnnnnnnnnnnnnnnnnnnnnnnnnnnnnnnnnnnnnnnnnnnnnnnnnnnnnnnnnnnnnnnnnnnnnnnnnnnnnnnnnnnnnnnnnnnnnnnnnnnnnnnnnnnnnnnnnnnnnnnnnnnnnnnnnnnnnnnnnnnnnnnnnnnnnnnnnnnnnnnnnnnnnnnnnnnnnnnnnnnnnnnnnnnnnnnnnnnnnnnnnnnnnnnnnnnnnnnnnnnnnnnnnnnnnnnnnnnnnnnnnnnnnnnnnnnnnnnnnnnnnnnnnnnnnnnnnnnnnnnnnnnnnnnnnnnnnnnnnnnnnnnnnnnnnnnnnnnnnnnnnnnnnnnnnnnnnnnnnnnnnnnnnnnnnnnnnnnnnnnnnnnnnnnnnnnnnnnnnnnnnnnnnnnnnnnnnnnnnnnnnnnnnnnnnnnnnnnnnnnnnnnnnnnnnnnnnnnnnnnnnnnnnnnnnnnnnnnnnnnnnnnnnnnnnnnnnnnnnnnnnnnnnnnnnnnnnnnnnnnnnnnnnnnnnnnnnnnnnnnnnnnnnnnnnnnnnnnnnnnnnnnnnnnnnnnnnnnnnnnnnnnnnnnnnnnnnnnnnnnnnnnnnnnnnnnnnnnnnnnnnnnnnnnnnnnnnnnnnnnnnnnnnnnnnnnnnnnnnnnnnnnnnnnnnnnnnnnnnnnnnnnnnnnnnnnnnnnnnnnnnnnnnnnnnnnnnnnnnnnnnnnnnnnnnnnnnnnnnnnnnnnnnnnnnnnnnnnnnnnnnnnnnnnnnnnnnnnnnnnnnnnnnnnnnnnnnnnnnnnnnnnnnnnnnnnnnnnnnnnnnnnnnnnnnnnnnnnnnnnnnnnnnnnnnnnnnnnnnnnnnnnnnnnnnnnnnnnnnnnnnnnnnnnnnnnnnnnnnnnnnnnnnnnnnnnnnnnnnnnnnnnnnnnnnnnnnnnnnnnnnnnnnnnnnnnnnnnnnnnnnnnnnnnnnnnnnnnnnnnnnnnnnnnnnnnnnnnnnnnnnnnnnnnnnnnnnnnnnnnnnnnnnnnnnnnnnnnnnnnnnnnnnnnnnnnnnnnnnnnnnnnnnnnnnnnnnnnnnnnnnnnnnnnnnnnnnnnnnnnnnnnnnnnnnnnnnnnnnnnnnnnnnnnnnnnnnnnnnnnnnnnnnnnnnnnnnnnnnnnnnnnnnnnnnnnnnnnnnnnnnnnnnnnnnnnnnnnnnnnnnnnnnnnnnnnnnnnnnnnnnnnnnnnnnnnnnnnnnnnnnnnnnnnnnnnnnnnnnnnnnnnnnnnnnnnnnnnnnnnnnnnnnnnnnnnnnnnnnnnnnnnnnnnnnnnnnnnnnnnnnnnnnnnnnnnnnnnnnnnnnnnnnnnnnnnnnnnnnnnnnnnnnnnnnnnnnnnnnnnnnnnnnnnnnnnnnnnnnnnnnnnnnnnnnnnnnnnnnnnnnnnnnnnnnnnnnnnnnnnnnnnnnnnnnnnnnnnnnnnnnnnnnnnnnnnnnnnnnnnnnnnnnnnnnnnnnnnnnnnnnnnnnnnnnnnnnnnnnnnnnnnnnnnnnnnnnnnnnnnnnnnnnnnnnnnnnnnnnnnnnnnnnnnnnnnnnnnnnnnnnnnnnnnnnnnnnnnnnnnnnnnnnnnnnnnnnnnnnnnnnnnnnnnnnnnnnnnnnnnnnnnnnnnnnnnnnnnnnnnnnnnnnnnnnnnnnnnnnnnnnnnnnnnnnnnnnnnnnnnnnnnnnnnnnnnnnnnnnnnnnnnnnnnnnnnnnnnnnnnnnnnnnnnnnnnnnnnnnnnnnnnnnnnnnnnnnnnnnnnnnnnnnnnnnnnnnnnnnnnnnnnnnnnnnnnnnnnnnnnnnnnnnnnnnnnnnnnnnnnnnnnnnnnnnnnnnnnnnnnnnnnnnnnnnnnnnnnnnnnnnnnnnnnnnnnnnnnnnnnnnnnnnnnnnnnnnnnnnnnnnnnnnnnnnnnnnnnnnnnnnnnnnnnnnnnnnnnnnnnnnnnnnnnnnnnnnnnnnnnnnnnnnnnnnnnnnnnnnnnnnnnnnnnnnnnnnnnnnnnnnnnnnnnnnnnnnnnnnnnnnnnnnnnnnnnnnnnnnnnnnnnnnnnnnnnnnnnnnnnnnnnnnnnnnnnnnnnnnnnnnnnnnnnnnnnnnnnnnnnnnnnnnnnnnnnnnnnnnnnnnnnnnnnnnnnnnnnnnnnnnnnnnnnnnnnnnnnnnnnnnnnnnnnnnnnnnnnnnnnnnnnnnnnnnnnnnnnnnnnnnnnnnnnnnnnnnnnnnnnnnnnnnnnnnnnnnnnnnnnnnnnnnnnnnnnnnnnnnnnnnnnnnnnnnnnnnnnnnnnnnnnnnnnnnnnnnnnnnnnnnnnnnnnnnnnnnnnnnnnnnnnnnnnnnnnnnnnnnnnnnnnnnnnnnnnnnnnnnnnnnnnnnnnnnnnnnnnnnnnnnnnnnnnnnnnnnnnnnnnnnnnnnnnnnnnnnnnnnnnnnnnnnnnnnnnnnnnnnnnnnnnnnnnnnnnnnnnnnnnnnnnnnnnnnnnnnnnnnnnnnnnnnnnnnnnnnnnnnnnnnnnnnnnnnnnnnnnnnnnnnnnnnnnnnnnnnnnnnnnnnnnnnnnnnnnnnnnnnnnnnnnnnnnnnnnnnnnnnnnnnnnnnnnnnnnnnnnnnnnnnnnnnnnnnnnnnnnnnnnnnnnnnnnnnnnnnnnnnnnnnnnnnnnnnnnnnnnnnnnnnnnnnnnnnnnnnnnnnnnnnnnnnnnnnnnnnnnnnnnnnnnnnnnnnnnnnnnnnnnnnnnnnnnnnnnnnnnnnnnnnnnnnnnnnnnnnnnnnnnnnnnnnnnnnnnnnnnnnnnnnnnnnnnnnnnnnnnnnnnnnnnnnnnnnnnnnnnnnnnnnnnnnnnnnnnnnnnnnnnnnnnnnnnnnnnnnnnnnnnnnnnnnnnnnnnnnnnnnnnnnnnnnnnnnnnnnnnnnnnnnnnnnnnnnnnnnnnnnnnnnnnnnnnnnnnnnnnnnnnnnnnnnnnnnnnnnnnnnnnnnnnnnnnnnnnnnnnnnnnnnnnnnnnnnnnnnnnnnnnnnnnnnnnnnnnnnnnnnnnnnnnnnnnnnnnnnnnnnnnnnnnnnnnnnnnnnnnnnnnnnnnnnnnnnnnnnnnnnnnnnnnnnnnnnnnnnnnnnnnnnnnnnnnnnnnnnnnnnnnnnnnnnnnnnnnnnnnnnnnnnnnnnnnnnnnnnnnnnnnnnnnnnnnnnnnnnnnnnnnnnnnnnnnnnnnnnnnnnnnnnnnnnnnnnnnnnnnnnnnnnnnnnnnnnnnnnnnnnnnnnnnnnnnnnnnnnnnnnnnnnnnnnnnnnnnnnnnnnnnnnnnnnnnnnnnnnnnnnnnnnnnnnnnnnnnnnnnnnnnnnnnnnnnnnnnnnnnnnnnnnnnnnnnnnnnnnnnnnnnnnnnnnnnnnnnnnnnnnnnnnnnnnnnnnnnnnnnnnnnnnnnnnnnnnnnnnnnnnnnnnnnnnnnnnnnnnnnnnnnnnnnnnnnnnnnnnnnnnnnnnnnnnnnnnnnnnnnnnnnnnnnnnnnnnnnnnnnnnnnnnnnnnnnnnnnnnnnnnnnnnnnnnnnnnnnnnnnnnnnnnnnnnnnnnnnnnnnnnnnnnnnnnnnnnnnnnnnnnnnnnnnnnnnnnnnnnnnnnnnnnnnnnnnnnnnnnnnnnnnnnnnnnnnnnnnnnnnnnnnnnnnnnnnnnnnnnnnnnnnnnnnnnnnnnnnnnnnnnnnnnnnnnnnnnnnnnnnnnnnnnnnnnnnnnnnnnnnnnnnnnnnnnnnnnnnnnnnnnnnnnnnnnnnnnnnnnnnnnnnnnnnnnnnnnnnnnnnnnnnnnnnnnnnnnnnnnnnnnnnnnnnnnnnnnnnnnnnnnnnnnnnnnnnnnnnnnnnnnnnnnnnnnnnnnnnnnnnnnnnnnnnnnnnnnnnnnnnnnnnnnnnnnnnnnnnnnnnnnnnnnnnnnnnnnnnnnnnnnnnnnnnnnnnnnnnnnnnnnnnnnnnnnnnnnnnnnnnnnnnnnnnnnnnnnnnnnnnnnnnnnnnnnnnnnnnnnnnnnnnnnnnnnnnnnnnnnnnnnnnnnnnnnnnnnnnnnnnnnnnnnnnnnnnnnnnnnnnnnnnnnnnnnnnnnnnnnnnnnnnnnnnnnnnnnnnnnnnnnnnnnnnnnnnnnnnnnnnnnnnnnnnnnnnnnnnnnnnnnnnnnnnnnnnnnnnnnnnnnnnnnnnnnnnnnnnnnnnnnnnnnnnnnnnnnnnnnnnnnnnnnnnnnnnnnnnnnnnnnnnnnnnnnnnnnnnnnnnnnnnnnnnnnnnnnnnnnnnnnnnnnnnnnnnnnnnnnnnnnnnnnnnnnnnnnnnnnnnnnnnnnnnnnnnnnnnnnnnnnnnnnnnnnnnnnnnnnnnnnnnnnnnnnnnnnnnnnnnnnnnnnnnnnnnnnnnnnnnnnnnnnnnnnnnnnnnnnnnnnnnnnnnnnnnnnnnnnnnnnnnnnnnnnnnnnnnnnnnnnnnnnnnnnnnnnnnnnnnnnnnnnnnnnnnnnnnnnnnnnnnnnnnnnnnnnnnnnnnnnnnnnnnnnnnnnnnnnnnnnnnnnnnnnnnnnnnnnnnnnnnnnnnnnnnnnnnnnnnnnnnnnnnnnnnnnnnnnnnnnnnnnnnnnnnnnnnnnnnnnnnnnnnnnnnnnnnnnnnnnnnnnnnnnnnnnnnnnnnnnnnnnnnnnnnnnnnnnnnnnnnnnnnnnnnnnnnnnnnnnnnnnnnnnnnnnnnnnnnnnnnnnnnnnnnnnnnnnnnnnnnnnnnnnnnnnnnnnnnnnnnnnnnnnnnnnnnnnnnnnnnnnnnnnnnnnnnnnnnnnnnnnnnnnnnnnnnnnnnnnnnnnnnnnnnnnnnnnnnnnnnnnnnnnnnnnnnnnnnnnnnnnnnnnnnnnnnnnnnnnnnnnnnnnnnnnnnnnnnnnnnnnnnnnnnnnnnnnnnnnnnnnnnnnnnnnnnnnnnnnnnnnnnnnnnnnnnnnnnnnnnnnnnnnnnnnnnnnnnnnnnnnnnnnnnnnnnnnnnnnnnnnnnnnnnnnnnnnnnnnnnnnnnnnnnnnnnnnnnnnnnnnnnnnnnnnnnnnnnnnnnnnnnnnnnnnnnnnnnnnnnnnnnnnnnnnnnnnnnnnnnnnnnnnnnnnnnnnnnnnnnnnnnnnnnnnnnnnnnnnnnnnnnnnnnnnnnnnnnnnnnnnnnnnnnnnnnnnnnnnnnnnnnnnnnnnnnnnnnnnnnnnnnnnnnnnnnnnnnnnnnnnnnnnnnnnnnnnnnnnnnnnnnnnnnnnnnnnnnnnnnnnnnnnnnnnnnnnnnnnnnnnnnnnnnnnnnnnnnnnnnnnnnnnnnnnnnnnnnnnnnnnnnnnnnnnnnnnnnnnnnnnnnnnnnnnnnnnnnnnnnnnnnnnnnnnnnnnnnnnnnnnnnnnnnnnnnnnnnnnnnnnnnnnnnnnnnnnnnnnnnnnnnnnnnnnnnnnnnnnnnnnnnnnnnnnnnnnnnnnnnnnnnnnnnnnnnnnnnnnnnnnnnnnnnnnnnnnnnnnnnnnnnnnnnnnnnnnnnnnnnnnnnnnnnnnnnnnnnnnnnnnnnnnnnnnnnnnnnnnnnnnnnnnnnnnnnnnnnnnnnnnnnnnnnnnnnnnnnnnnnnnnnnnnnnnnnnnnnnnnnnnnnnnnnnnnnnnnnnnnnnnnnnnnnnnnnnnnnnnnnnnnnnnnnnnnnnnnnnnnnnnnnnnnnnnnnnnnnnnnnnnnnnnnnnnnnnnnnnnnnnnnnnnnnnnnnnnnnnnnnnnnnnnnnnnnnnnnnnnnnnnnnnnnnnnnnnnnnnnnnnnnnnnnnnnnnnnnnnnnnnnnnnnnnnnnnnnnnnnnnnnnnnnnnnnnnnnnnnnnnnnnnnnnnnnnnnnnnnnnnnnnnnnnnnnnnnnnnnnnnnnnnnnnnnnnnnnnnnnnnnnnnnnnnnnnnnnnnnnnnnnnnnnnnnnnnnnnnnnnnnnnnnnnnnnnnnnnnnnnnnnnnnnnnnnnnnnnnnnnnnnnnnnnnnnnnnnnnnnnnnnnnnnnnnnnnnnnnnnnnnnnnnnnnnnnnnnnnnnnnnnnnnnnnnnnnnnnnnnnnnnnnnnnnnnnnnnnnnnnnnnnnnnnnnnnnnnnnnnnnnnnnnnnnnnnnnnnnnnnnnnnnnnnnnnnnnnnnnnnnnnnnnnnnnnnnnnnnnnnnnnnnnnnnnnnnnnnnnnnnnnnnnnnnnnnnnnnnnnnnnnnnnnnnnnnnnnnnnnnnnnnnnnnnnnnnnnnnnnnnnnnnnnnnnnnnnnnnnnnnnnnnnnnnnnnnnnnnnnnnnnnnnnnnnnnnnnnnnnnnnnnnnnnnnnnnnnnnnnnnnnnnnnnnnnnnnnnnnnnnnnnnnnnnnnnnnnnnnnnnnnnnnnnnnnnnnnnnnnnnnnnnnnnnnnnnnnnnnnnnnnnnnnnnnnnnnnnnnnnnnnnnnnnnnnnnnnnnnnnnnnnnnnnnnnnnnnnnnnnnnnnnnnnnnnnnnnnnnnnnnnnnnnnnnnnnnnnnnnnnnnnnnnnnnnnnnnnnnnnnnnnnnnnnnnnnnnnnnnnnnnnnnnnnnnnnnnnnnnnnnnnnnnnnnnnnnnnnnnnnnnnnnnnnnnnnnnnnnnnnnnnnnnnnnnnnnnnnnnnnnnnnnnnnnnnnnnnnnnnnnnnnnnnnnnnnnnnnnnnnnnnnnnnnnnnnnnnnnnnnnnnnnnnnnnnnnnnnnnnnnnnnnnnnnnnnnnnnnnnnnnnnnnnnnnnnnnnnnnnnnnnnnnnnnnnnnnnnnnnnnnnnnnnnnnnnnnnnnnnnnnnnnnnnnnnnnnnnnnnnnnnnnnnnnnnnnnnnnnnnnnnnnnnnnnnnnnnnnnnnnnnnnnnnnnnnnnnnnnnnnnnnnnnnnnnnnnnnnnnnnnnnnnnnnnnnnnnnnnnnnnnnnnnnnnnnnnnnnnnnnnnnnnnnnnnnnnnnnnnnnnnnnnnnnnnnnnnnnnnnnnnnnnnnnnnnnnnnnnnnnnnnnnnnnnnnnnnnnnnnnnnnnnnnnnnnnnnnnnnnnnnnnnnnnnnnnnnnnnnnnnnnnnnnnnnnnnnnnnnnnnnnnnnnnnnnnnnnnnnnnnnnnnnnnnnnnnnnnnnnnnnnnnnnnnnnnnnnnnnnnnnnnnnnnnnnnnnnnnnnnnnnnnnnnnnnnnnnnnnnnnnnnnnnnnnnnnnnnnnnnnnnnnnnnnnnnnnnnnnnnnnnnnnnnnnnnnnnnnnnnnnnnnnnnnnnnnnnnnnnnnnnnnnnnnnnnnnnnnnnnnnnnnnnnnnnnnnnnnnnnnnnnnnnnnnnnnnnnnnnnnnnnnnnnnnnnnnnnnnnnnnnnnnnnnnnnnnnnnnnnnnnnnnnnnnnnnnnnnnnnnnnnnnnnnnnnnnnnnnnnnnnnnnnnnnnnnnnnnnnnnnnnnnnnnnnnnnnnnnnnnnnnnnnnnnnnnnnnnnnnnnnnnnnnnnnnnnnnnnnnnnnnnnnnnnnnnnnnnnnnnnnnnnnnnnnnnnnnnnnnnnnnnnnnnnnnnnnnnnnnnnnnnnnnnnnnnnnnnnnnnnnnnnnnnnnnnnnnnnnnnnnnnnnnnnnnnnnnnnnnnnnnnnnnnnnnnnnnnnnnnnnnnnnnnnnnnnnnnnnnnnnnnnnnnnnnnnnnnnnnnnnnnnnnnnnnnnnnnnnnnnnnnnnnnnnnnnnnnnnnnnnnnnnnnnnnnnnnnnnnnnnnnnnnnnnnnnnnnnnnnnnnnnnnnnnnnnnnnnnnnnnnnnnnnnnnnnnnnnnnnnnnnnnnnnnnnnnnnnnnnnnnnnnnnnnnnnnnnnnnnnnnnnnnnnnnnnnnnnnnnnnnnnnnnnnnnnnnnnnnnnnnnnnnnnnnnnnnnnnnnnnnnnnnnnnnnnnnnnnnnnnnnnnnnnnnnnnnnnnnnnnnnnnnnnnnnnnnnnnnnnnnnnnnnnnnnnnnnnnnnnnnnnnnnnnnnnnnnnnnnnnnnnnnnnnnnnnnnnnnnnnnnnnnnnnnnnnnnnnnnnnnnnnnnnnnnnnnnnnnnnnnnnnnnnnnnnnnnnnnnnnnnnnnnnnnnnnnnnnnnnnnnnnnnnnnnnnnnnnnnnnnnnnnnnnnnnnnnnnnnnnnnnnnnnnnnnnnnnnnnnnnnnnnnnnnnnnnnnnnnnnnnnnnnnnnnnnnnnnnnnnnnnnnnnnnnnnnnnnnnnnnnnnnnnnnnnnnnnnnnnnnnnnnnnnnnnnnnnnnnnnnnnnnnnnnnnnnnnnnnnnnnnnnnnnnnnnnnnnnnnnnnnnnnnnnnnnnnnnnnnnnnnnnnnnnnnnnnnnnnnnnnnnnnnnnnnnnnnnnnnnnnnnnnnnnnnnnnnnnnnnnnnnnnnnnnnnnnnnnnnnnnnnnnnnnnnnnnnnnnnnnnnnnnnnnnnnnnnnnnnnnnnnnnnnnnnnnnnnnnnnnnnnnnnnnnnnnnnnnnnnnnnnnnnnnnnnnnnnnnnnnnnnnnnnnnnnnnnnnnnnnnnnnnnnnnnnnnnnnnnnnnnnnnnnnnnnnnnnnnnnnnnnnnnnnnnnnnnnnnnnnnnnnnnnnnnnnnnnnnnnnnnnnnnnnnnnnnnnnnnnnnnnnnnnnnnnnnnnnnnnnnnnnnnnnnnnnnnnnnnnnnnnnnnnnnnnnnnnnnnnnnnnnnnnnnnnnnnnnnnnnnnnnnnnnnnnnnnnnnnnnnnnnnnnnnnnnnnnnnnnnnnnnnnnnnnnnnnnnnnnnnnnnnnnnnnnnnnnnnnnnnnnnnnnnnnnnnnnnnnnnnnnnnnnnnnnnnnnnnnnnnnnnnnnnnnnnnnnnnnnnnnnnnnnnnnnnnnnnnnnnnnnnnnnnnnnnnnnnnnnnnnnnnnnnnnnnnnnnnnnnnnnnnnnnnnnnnnnnnnnnnnnnnnnnnnnnnnnnnnnnnnnnnnnnnnnnnnnnnnnnnnnnnnnnnnnnnnnnnnnnnnnnnnnnnnnnnnnnnnnnnnnnnnnnnnnnnnnnnnnnnnnnnnnnnnnnnnnnnnnnnnnnnnnnnnnnnnnnnnnnnnnnnnnnnnnnnnnnnnnnnnnnnnnnnnnnnnnnnnnnnnnnnnnnnnnnnnnnnnnnnnnnnnnnnnnnnnnnnnnnnnnnnnnnnnnnnnnnnnnnnnnnnnnnnnnnnnnnnnnnnnnnnnnnnnnnnnnnnnnnnnnnnnnnnnnnnnnnnnnnnnnnnnnnnnnnnnnnnnnnnnnnnnnnnnnnnnnnnnnnnnnnnnnnnnnnnnnnnnnnnnnnnnnnnnnnnnnnnnnnnnnnnnnnnnnnnnnnnnnnnnnnnnnnnnnnnnnnnnnnnnnnnnnnnnnnnnnnnnnnnnnnnnnnnnnnnnnnnnnnnnnnnnnnnnnnnnnnnnnnnnnnnnnnnnnnnnnnnnnnnnnnnnnnnnnnnnnnnnnnnnnnnnnnnnnnnnnnnnnnnnnnnnnnnnnnnnnnnnnnnnnnnnnnnnnnnnnnnnnnnnnnnnnnnnnnnnnnnnnnnnnnnnnnnnnnnnnnnnnnnnnnnnnnnnnnnnnnnnnnnnnnnnnnnnnnnnnnnnnnnnnnnnnnnnnnnnnnnnnnnnnnnnnnnnnnnnnnnnnnnnnnnnnnnnnnnnnnnnnnnnnnnnnnnnnnnnnnnnnnnnnnnnnnnnnnnnnnnnnnnnnnnnnnnnnnnnnnnnnnnnnnnnnnnnnnnnnnnnnnnnnnnnnnnnnnnnnnnnnnnnnnnnnnnnnnnnnnnnnnnnnnnnnnnnnnnnnnnnnnnnnnnnnnnnnnnnnnnnnnnnnnnnnnnnnnnnnnnnnnnnnnnnnnnnnnnnnnnnnnnnnnnnnnnnnnnnnnnnnnnnnnnnnnnnnnnnnnnnnnnnnnnnnnnnnnnnnnnnnnnnnnnnnnnnnnnnnnnnnnnnnnnnnnnnnnnnnnnnnnnnnnnnnnnnnnnnnnnnnnnnnnnnnnnnnnnnnnnnnnnnnnnnnnnnnnnnnnnnnnnnnnnnnnnnnnnnnnnnnnnnnnnnnnnnnnnnnnnnnnnnnnnnnnnnnnnnnnnnnnnnnnnnnnnnnnnnnnnnnnnnnnnnnnnnnnnnnnnnnnnnnnnnnnnnnnnnnnnnnnnnnnnnnnnnnnnnnnnnnnnnnnnnnnnnnnnnnnnnnnnnnnnnnnnnnnnnnnnnnnnnnnnnnnnnnnnnnnnnnnnnnnnnnnnnnnnnnnnnnnnnnnnnnnnnnnnnnnnnnnnnnnnnnnnnnnnnnnnnnnnnnnnnnnnnnnnnnnnnnnnnnnnnnnnnnnnnnnnnnnnnnnnnnnnnnnnnnnnnnnnnnnnnnnnnnnnnnnnnnnnnnnnnnnnnnnnnnnnnnnnnnnnnnnnnnnnnnnnnnnnnnnnnnnnnnnnnnnnnnnnnnnnnnnnnnnnnnnnnnnnnnnnnnnnnnnnnnnnnnnnnnnnnnnnnnnnnnnnnnnnnnnnnnnnnnnnnnnnnnnnnnnnnnnnnnnnnnnnnnnnnnnnnnnnnnnnnnnnnnnnnnnnnnnnnnnnnnnnnnnnnnnnnnnnnnnnnnnnnnnnnnnnnnnnnnnnnnnnnnnnnnnnnnnnnnnnnnnnnnnnnnnnnnnnnnnnnnnnnnnnnnnnnnnnnnnnnnnnnnnnnnnnnnnnnnnnnnnnnnnnnnnnnnnnnnnnnnnnnnnnnnnnnnnnnnnnnnnnnnnnnnnnnnnnnnnnnnnnnnnnnnnnnnnnnnnnnnnnnnnnnnnnnnnnnnnnnnnnnnnnnnnnnnnnnnnnnnnnnnnnnnnnnnnnnnnnnnnnnnnnnnnnnnnnnnnnnnnnnnnnnnnnnnnnnnnnnnnnnnnnnnnnnnnnnnnnnnnnnnnnnnnnnnnnnnnnnnnnnnnnnnnnnnnnnnnnnnnnnnnnnnnnnnnnnnnnnnnnnnnnnnnnnnnnnnnnnnnnnnnnnnnnnnnnnnnnnnnnnnnnnnnnnnnnnnnnnnnnnnnnnnnnnnnnnnnnnnnnnnnnnnnnnnnnnnnnnnnnnnnnnnnnnnnnnnnnnnnnnnnnnnnnnnnnnnnnnnnnnnnnnnnnnnnnnnnnnnnnnnnnnnnnnnnnnnnnnnnnnnnnnnnnnnnnnnnnnnnnnnnnnnnnnnnnnnnnnnnnnnnnnnnnnnnnnnnnnnnnnnnnnnnnnnnnnnnnnnnnnnnnnnnnnnnnnnnnnnnnnnnnnnnnnnnnnnnnnnnnnnnnnnnnnnnnnnnnnnnnnnnnnnnnnnnnnnnnnnnnnnnnnnnnnnnnnnnnnnnnnnnnnnnnnnnnnnnnnnnnnnnnnnnnnnnnnnnnnnnnnnnnnnnnnnnnnnnnnnnnnnnnnnnnnnnnnnnnnnnnnnnnnnnnnnnnnnnnnnnnnnnnnnnnnnnnnnnnnnnnnnnnnnnnnnnnnnnnnnnnnnnnnnnnnnnnnnnnnnnnnnnnnnnnnnnnnnnnnnnnnnnnnnnnnnnnnnnnnnnnnnnnnnnnnnnnnnnnnnnnnnnnnnnnnnnnnnnnnnnnnnnnnnnnnnnnnnnnnnnnnnnnnnnnnnnnnnnnnnnnnnnnnnnnnnnnnnnnnnnnnnnnnnnnnnnnnnnnnnnnnnnnnnnnnnnnnnnnnnnnnnnnnnnnnnnnnnnnnnnnnnnnnnnnnnnnnnnnnnnnnnnnnnnnnnnnnnnnnnnnnnnnnnnnnnnnnnnnnnnnnnnnnnnnnnnnnnnnnnnnnnnnnnnnnnnnnnnnnnnnnnnnnnnnnnnnnnnnnnnnnnnnnnnnnnnnnnnnnnnnnnnnnnnnnnnnnnnnnnnnnnnnnnnnnnnnnnnnnnnnnnnnnnnnnnnnnnnnnnnnnnnnnnnnnnnnnnnnnnnnnnnnnnnnnnnnnnnnnnnnnnnnnnnnnnnnnnnnnnnnnnnnnnnnnnnnnnnnnnnnnnnnnnnnnnnnnnnnnnnnnnnnnnnnnnnnnnnnnnnnnnnnnnnnnnnnnnnnnnnnnnnnnnnnnnnnnnnnnnnnnnnnnnnnnnnnnnnnnnnnnnnnnnnnnnnnnnnnnnnnnnnnnnnnnnnnnnnnnnnnnnnnnnnnnnnnnnnnnnnnnnnnnnnnnnnnnnnnnnnnnnnnnnnnnnnnnnnnnnnnnnnnnnnnnnnnnnnnnnnnnnnnnnnnnnnnnnnnnnnnnnnnnnnnnnnnnnnnnnnnnnnnnnnnnnnnnnnnnnnnnnnnnnnnnnnnnnnnnnnnnnnnnnnnnnnnnnnnnnnnnnnnnnnnnnnnnnnnnnnnnnnnnnnnnnnnnnnnnnnnnnnnnnnnnnnnnnnnnnnnnnnnnnnnnnnnnnnnnnnnnnnnnnnnnnnnnnnnnnnnnnnnnnnnnnnnnnnnnnnnnnnnnnnnnnnnnnnnnnnnnnnnnnnnnnnnnnnnnnnnnnnnnnnnnnnnnnnnnnnnnnnnnnnnnnnnnnnnnnnnnnnnnnnnnnnnnnnnnnnnnnnnnnnnnnnnnnnnnnnnnnnnnnnnnnnnnnnnnnnnnnnnnnnnnnnnnnnnnnnnnnnnnnnnnnnnnnnnnnnnnnnnnnnnnnnnnnnnnnnnnnnnnnnnnnnnnnnnnnnnnnnnnnnnnnnnnnnnnnnnnnnnnnnnnnnnnnnnnnnnnnnnnnnnnnnnnnnnnnnnnnnnnnnnnnnnnnnnnnnnnnnnnnnnnnnnnnnnnnnnnnnnnnnnnnnnnnnnnnnnnnnnnnnnnnnnnnnnnnnnnnnnnnnnnnnnnnnnnnnnnnnnnnnnnnnnnnnnnnnnnnnnnnnnnnnnnnnnnnnnnnnnnnnnnnnnnnnnnnnnnnnnnnnnnnnnnnnnnnnnnnnnnnnnnnnnnnnnnnnnnnnnnnnnnnnnnnnnnnnnnnnnnnnnnnnnnnnnnnnnnnnnnnnnnnnnnnnnnnnnnnnnnnnnnnnnnnnnnnnnnnnnnnnnnnnnnnnnnnnnnnnnnnnnnnnnnnnnnnnnnnnnnnnnnnnnnnnnnnnnnnnnnnnnnnnnnnnnnnnnnnnnnnnnnnnnnnnnnnnnnnnnnnnnnnnnnnnnnnnnnnnnnnnnnnnnnnnnnnnnnnnnnnnnnnnnnnnnnnnnnnnnnnnnnnnnnnnnnnnnnnnnnnnnnnnnnnnnnnnnnnnnnnnnnnnnnnnnnnnnnnnnnnnnnnnnnnnnnnnnnnnnnnnnnnnnnnnnnnnnnnnnnnnnnnnnnnnnnnnnnnnnnnnnnnnnnnnnnnnnnnnnnnnnnnnnnnnnnnnnnnnnnnnnnnnnnnnnnnnnnnnnnnnnnnnnnnnnnnnnnnnnnnnnnnnnnnnnnnnnnnnnnnnnnnnnnnnnnnnnnnnnnnnnnnnnnnnnnnnnnnnnnnnnnnnnnnnnnnnnnnnnnnnnnnnnnnnnnnnnnnnnnnnnnnnnnnnnnnnnnnnnnnnnnnnnnnnnnnnnnnnnnnnnnnnnnnnnnnnnnnnnnnnnnnnnnnnnnnnnnnnnnnnnnnnnnnnnnnnnnnnnnnnnnnnnnnnnnnnnnnnnnnnnnnnnnnnnnnnnnnnnnnnnnnnnnnnnnnnnnnnnnnnnnnnnnnnnnnnnnnnnnnnnnnnnnnnnnnnnnnnnnnnnnnnnnnnnnnnnnnnnnnnnnnnnnnnnnnnnnnnnnnnnnnnnnnnnnnnnnnnnnnnnnnnnnnnnnnnnnnnnnnnnnnnnnnnnnnnnnnnnnnnnnnnnnnnnnnnnnnnnnnnnnnnnnnnnnnnnnnnnnnnnnnnnnnnnnnnnnnnnnnnnnnnnnnnnnnnnnnnnnnnnnnnnnnnnnnnnnnnnnnnnnnnnnnnnnnnnnnnnnnnnnnnnnnnnnnnnnnnnnnnnnnnnnnnnnnnnnnnnnnnnnnnnnnnnnnnnnnnnnnnnnnnnnnnnnnnnnnnnnnnnnnnnnnnnnnnnnnnnnnnnnnnnnnnnnnnnnnnnnnnnnnnnnnnnnnnnnnnnnnnnnnnnnnnnnnnnnnnnnnnnnnnnnnnnnnnnnnnnnnnnnnnnnnnnnnnnnnnnnnnnnnnnnnnnnnnnnnnnnnnnnnnnnnnnnnnnnnnnnnnnnnnnnnnnnnnnnnnnnnnnnnnnnnnnnnnnnnnnnnnnnnnnnnnnnnnnnnnnnnnnnnnnnnnnnnnnnnnnnnnnnnnnnnnnnnnnnnnnnnnnnnnnnnnnnnnnnnnnnnnnnnnnnnnnnnnnnnnnnnnnnnnnnnnnnnnnnnnnnnnnnnnnnnnnnnnnnnnnnnnnnnnnnnnnnnnnnnnnnnnnnnnnnnnnnnnnnnnnnnnnnnnnnnnnnnnnnnnnnnnnnnnnnnnnnnnnnnnnnnnnnnnnnnnnnnnnnnnnnnnnnnnnnnnnnnnnnnnnnnnnnnnnnnnnnnnnnnnnnnnnnnnnnnnnnnnnnnnnnnnnnnnnnnnnnnnnnnnnnnnnnnnnnnnnnnnnnnnnnnnnnnnnnnnnnnnnnnnnnnnnnnnnnnnnnnnnnnnnnnnnnnnnnnnnnnnnnnnnnnnnnnnnnnnnnnnnnnnnnnnnnnnnnnnnnnnnnnnnnnnnnnnnnnnnnnnnnnnnnnnnnnnnnnnnnnnnnnnnnnnnnnnnnnnnnnnnnnnnnnnnnnnnnnnnnnnnnnnnnnnnnnnnnnnnnnnnnnnnnnnnnnnnnnnnnnnnnnnnnnnnnnnnnnnnnnnnnnnnnnnnnnnnnnnnnnnnnnnnnnnnnnnnnnnnnnnnnnnnnnnnnnnnnnnnnnnnnnnnnnnnnnnnnnnnnnnnnnnnnnnnnnnnnnnnnnnnnnnnnnnnnnnnnnnnnnnnnnnnnnnnnnnnnnnnnnnnnnnnnnnnnnnnnnnnnnnnnnnnnnnnnnnnnnnnnnnnnnnnnnnnnnnnnnnnnnnnnnnnnnnnnnnnnnnnnnnnnnnnnnnnnnnnnnnnnnnnnnnnnnnnnnnnnnnnnnnnnnnnnnnnnnnnnnnnnnnnnnnnnnnnnnnnnnnnnnnnnnnnnnnnnnnnnnnnnnnnnnnnnnnnnnnnnnnnnnnnnnnnnnnnnnnnnnnnnnnnnnnnnnnnnnnnnnnnnnnnnnnnnnnnnnnnnnnnnnnnnnnnnnnnnnnnnnnnnnnnnnnnnnnnnnnnnnnnnnnnnnnnnnnnnnnnnnnnnnnnnnnnnnnnnnnnnnnnnnnnnnnnnnnnnnnnnnnnnnnnnnnnnnnnnnnnnnnnnnnnnnnnnnnnnnnnnnnnnnnnnnnnnnnnnnnnnnnnnnnnnnnnnnnnnnnnnnnnnnnnnnnnnnnnnnnnnnnnnnnnnnnnnnnnnnnnnnnnnnnnnnnnnnnnnnnnnnnnnnnnnnnnnnnnnnnnnnnnnnnnnnnnnnnnnnnnnnnnnnnnnnnnnnnnnnnnnnnnnnnnnnnnnnnnnnnnnnnnnnnnnnnnnnnnnnnnnnnnnnnnnnnnnnnnnnnnnnnnnnnnnnnnnnnnnnnnnnnnnnnnnnnnnnnnnnnnnnnnnnnnnnnnnnnnnnnnnnnnnnnnnnnnnnnnnnnnnnnnnnnnnnnnnnnnnnnnnnnnnnnnnnnnnnnnnnnnnnnnnnnnnnnnnnnnnnnnnnnnnnnnnnnnnnnnnnnnnnnnnnnnnnnnnnnnnnnnnnnnnnnnnnnnnnnnnnnnnnnnnnnnnnnnnnnnnnnnnnnnnnnnnnnnnnnnnnnnnnnnnnnnnnnnnnnnnnnnnnnnnnnnnnnnnnnnnnnnnnnnnnnnnnnnnnnnnnnnnnnnnnnnnnnnnnnnnnnnnnnnnnnnnnnnnnnnnnnnnnnnnnnnnnnnnnnnnnnnnnnnnnnnnnnnnnnnnnnnnnnnnnnnnnnnnnnnnnnnnnnnnnnnnnnnnnnnnnnnnnnnnnnnnnnnnnnnnnnnnnnnnnnnnnnnnnnnnnnnnnnnnnnnnnnnnnnnnnnnnnnnnnnnnnnnnnnnnnnnnnnnnnnnnnnnnnnnnnnnnnnnnnnnnnnnnnnnnnnnnnnnnnnnnnnnnnnnnnnnnnnnnnnnnnnnnnnnnnnnnnnnnnnnnnnnnnnnnnnnnnnnnnnnnnnnnnnnnnnnnnnnnnnnnnnnnnnnnnnnnnnnnnnnnnnnnnnnnnnnnnnnnnnnnnnnnnnnnnnnnnnnnnnnnnnnnnnnnnnnnnnnnnnnnnnnnnnnnnnnnnnnnnnnnnnnnnnnnnnnnnnnnnnnnnnnnnnnnnnnnnnnnnnnnnnnnnnnnnnnnnnnnnnnnnnnnnnnnnnnnnnnnnnnnnnnnnnnnnnnnnnnnnnnnnnnnnnnnnnnnnnnnnnnnnnnnnnnnnnnnnnnnnnnnnnnnnnnnnnnnnnnnnnnnnnnnnnnnnnnnnnnnnnnnnnnnnnnnnnnnnnnnnnnnnnnnnnnnnnnnnnnnnnnnnnnnnnnnnnnnnnnnnnnnnnnnnnnnnnnnnnnnnnnnnnnnnnnnnnnnnnnnnnnnnnnnnnnnnnnnnnnnnnnnnnnnnnnnnnnnnnnnnnnnnnnnnnnnnnnnnnnnnnnnnnnnnnnnnnnnnnnnnnnnnnnnnnnnnnnnnnnnnnnnnnnnnnnnnnnnnnnnnnnnnnnnnnnnnnnnnnnnnnnnnnnnnnnnnnnnnnnnnnnnnnnnnnnnnnnnnnnnnnnnnnnnnnnnnnnnnnnnnnnnnnnnnnnnnnnnnnnnnnnnnnnnnnnnnnnnnnnnnnnnnnnnnnnnnnnnnnnnnnnnnnnnnnnnnnnnnnnnnnnnnnnnnnnnnnnnnnnnnnnnnnnnnnnnnnnnnnnnnnnnnnnnnnnnnnnnnnnnnnnnnnnnnnnnnnnnnnnnnnnnnnnnnnnnnnnnnnnnnnnnnnnnnnnnnnnnnnnnnnnnnnnnnnnnnnnnnnnnnnnnnnnnnnnnnnnnnnnnnnnnnnnnnnnnnnnnnnnnnnnnnnnnnnnnnnnnnnnnnnnnnnnnnnnnnnnnnnnnnnnnnnnnnnnnnnnnnnnnnnnnnnnnnnnnnnnnnnnnnnnnnnnnnnnnnnnnnnnnnnnnnnnnnnnnnnnnnnnnnnnnnnnnnnnnnnnnnnnnnnnnnnnnnnnnnnnnnnnnnnnnnnnnnnnnnnnnnnnnnnnnnnnnnnnnnnnnnnnnnnnnnnnnnnnnnnnnnnnnnnnnnnnnnnnnnnnnnnnnnnnnnnnnnnnnnnnnnnnnnnnnnnnnnnnnnnnnnnnnnnnnnnnnnnnnnnnnnnnnnnnnnnnnnnnnnnnnnnnnnnnnnnnnnnnnnnnnnnnnnnnnnnnnnnnnnnnnnnnnnnnnnnnnnnnnnnnnnnnnnnnnnnnnnnnnnnnnnnnnnnnnnnnnnnnnnnnnnnnnnnnnnnnnnnnnnnnnnnnnnnnnnnnnnnnnnnnnnnnnnnnnnnnnnnnnnnnnnnnnnnnnnnnnnnnnnnnnnnnnnnnnnnnnnnnnnnnnnnnnnnnnnnnnnnnnnnnnnnnnnnnnnnnnnnnnnnnnnnnnnnnnnnnnnnnnnnnnnnnnnnnnnnnnnnnnnnnnnnnnnnnnnnnnnnnnnnnnnnnnnnnnnnnnnnnnnnnnnnnnnnnnnnnnnnnnnnnnnnnnnnnnnnnnnnnnnnnnnnnnnnnnnnnnnnnnnnnnnnnnnnnnnnnnnnnnnnnnnnnnnnnnnnnnnnnnnnnnnnnnnnnnnnnnnnnnnnnnnnnnnnnnnnnnnnnnnnnnnnnnnnnnnnnnnnnnnnnnnnnnnnnnnnnnnnnnnnnnnnnnnnnnnnnnnnnnnnnnnnnnnnnnnnnnnnnnnnnnnnnnnnnnnnnnnnnnnnnnnnnnnnnnnnnnnnnnnnnnnnnnnnnnnnnnnnnnnnnnnnnnnnnnnnnnnnnnnnnnnnnnnnnnnnnnnnnnnnnnnnnnnnnnnnnnnnnnnnnnnnnnnnnnnnnnnnnnnnnnnnnnnnnnnnnnnnnnnnnnnnnnnnnnnnnnnnnnnnnnnnnnnnnnnnnnnnnnnnnnnnnnnnnnnnnnnnnnnnnnnnnnnnnnnnnnnnnnnnnnnnnnnnnnnnnnnnnnnnnnnnnnnnnnnnnnnnnnnnnnnnnnnnnnnnnnnnnnnnnnnnnnnnnnnnnnnnnnnnnnnnnnnnnnnnnnnnnnnnnnnnnnnnnnnnnnnnnnnnnnnnnnnnnnnnnnnnnnnnnnnnnnnnnnnnnnnnnnnnnnnnnnnnnnnnnnnnnnnnnnnnnnnnnnnnnnnnnnnnnnnnnnnnnnnnnnnnnnnnnnnnnnnnnnnnnnnnnnnnnnnnnnnnnnnnnnnnnnnnnnnnnnnnnnnnnnnnnnnnnnnnnnnnnnnnnnnnnnnnnnnnnnnnnnnnnnnnnnnnnnnnnnnnnnnnnnnnnnnnnnnnnnnnnnnnnnnnnnnnnnnnnnnnnnnnnnnnnnnnnnnnnnnnnnnnnnnnnnnnnnnnnnnnnnnnnnnnnnnnnnnnnnnnnnnnnnnnnnnnnnnnnnnnnnnnnnnnnnnnnnnnnnnnnnnnnnnnnnnnnnnnnnnnnnnnnnnnnnnnnnnnnnnnnnnnnnnnnnnnnnnnnnnnnnnnnnnnnnnnnnnnnnnnnnnnnnnnnnnnnnnnnnnnnnnnnnnnnnnnnnnnnnnnnnnnnnnnnnnnnnnnnnnnnnnnnnnnnnnnnnnnnnnnnnnnnnnnnnnnnnnnnnnnnnnnnnnnnnnnnnnnnnnnnnnnnnnnnnnnnnnnnnnnnnnnnnnnnnnnnnnnnnnnnnnnnnnnnnnnnnnnnnnnnnnnnnnnnnnnnnnnnnnnnnnnnnnnnnnnnnnnnnnnnnnnnnnnnnnnnnnnnnnnnnnnnnnnnnnnnnnnnnnnnnnnnnnnnnnnnnnnnnnnnnnnnnnnnnnnnnnnnnnnnnnnnnnnnnnnnnnnnnnnnnnnnnnnnnnnnnnnnnnnnnnnnnnnnnnnnnnnnnnnnnnnnnnnnnnnnnnnnnnnnnnnnnnnnnnnnnnnnnnnnnnnnnnnnnnnnnnnnnnnnnnnnnnnnnnnnnnnnnnnnnnnnnnnnnnnnnnnnnnnnnnnnnnnnnnnnnnnnnnnnnnnnnnnnnnnnnnnnnnnnnnnnnnnnnnnnnnnnnnnnnnnnnnnnnnnnnnnnnnnnnnnnnnnnnnnnnnnnnnnnnnnnnnnnnnnnnnnnnnnnnnnnnnnnnnnnnnnnnnnnnnnnnnnnnnnnnnnnnnnnnnnnnnnnnnnnnnnnnnnnnnnnnnnnnnnnnnnnnnnnnnnnnnnnnnnnnnnnnnnnnnnnnnnnnnnnnnnnnnnnnnnnnnnnnnnnnnnnnnnnnnnnnnnnnnnnnnnnnnnnnnnnnnnnnnnnnnnnnnnnnnnnnnnnnnnnnnnnnnnnnnnnnnnnnnnnnnnnnnnnnnnnnnnnnnnnnnnnnnnnnnnnnnnnnnnnnnnnnnnnnnnnnnnnnnnnnnnnnnnnnnnnnnnnnnnnnnnnnnnnnnnnnnnnnnnnnnnnnnnnnnnnnnnnnnnnnnnnnnnnnnnnnnnnnnnnnnnnnnnnnnnnnnnnnnnnnnnnnnnnnnnnnnnnnnnnnnnnnnnnnnnnnnnnnnnnnnnnnnnnnnnnnnnnnnnnnnnnnnnnnnnnnnnnnnnnnnnnnnnnnnnnnnnnnnnnnnnnnnnnnnnnnnnnnnnnnnnnnnnnnnnnnnnnnnnnnnnnnnnnnnnnnnnnnnnnnnnnnnnnnnnnnnnnnnnnnnnnnnnnnnnnnnnnnnnnnnnnnnnnnnnnnnnnnnnnnnnnnnnnnnnnnnnnnnnnnnnnnnnnnnnnnnnnnnnnnnnnnnnnnnnnnnnnnnnnnnnnnnnnnnnnnnnnnnnnnnnnnnnnnnnnnnnnnnnnnnnnnnnnnnnnnnnnnnnnnnnnnnnnnnnnnnnnnnnnnnnnnnnnnnnnnnnnnnnnnnnnnnnnnnnnnnnnnnnnnnnnnnnnnnnnnnnnnnnnnnnnnnnnnnnnnnnnnnnnnnnnnnnnnnnnnnnnnnnnnnnnnnnnnnnnnnnnnnnnnnnnnnnnnnnnnnnnnnnnnnnnnnnnnnnnnnnnnnnnnnnnnnnnnnnnnnnnnnnnnnnnnnnnnnnnnnnnnnnnnnnnnnnnnnnnnnnnnnnnnnnnnnnnnnnnnnnnnnnnnnnnnnnnnnnnnnnnnnnnnnnnnnnnnnnnnnnnnnnnnnnnnnnnnnnnnnnnnnnnnnnnnnnnnnnnnnnnnnnnnnnnnnnnnnnnnnnnnnnnnnnnnnnnnnnnnnnnnnnnnnnnnnnnnnnnnnnnnnnnnnnnnnnnnnnnnnnnnnnnnnnnnnnnnnnnnnnnnnnnnnnnnnnnnnnnnnnnnnnnnnnnnnnnnnnnnnnnnnnnnnnnnnnnnnnnnnnnnnnnnnnnnnnnnnnnnnnnnnnnnnnnnnnnnnnnnnnnnnnnnnnnnnnnnnnnnnnnnnnnnnnnnnnnnnnnnnnnnnnnnnnnnnnnnnnnnnnnnnnnnnnnnnnnnnnnnnnnnnnnnnnnnnnnnnnnnnnnnnnnnnnnnnnnnnnnnnnnnnnnnnnnnnnnnnnnnnnnnnnnnnnnnnnnnnnnnnnnnnnnnnnnnnnnnnnnnnnnnnnnnnnnnnnnnnnnnnnnnnnnnnnnnnnnnnnnnnnnnnnnnnnnnnnnnnnnnnnnnnnnnnnnnnnnnnnnnnnnnnnnnnnnnnnnnnnnnnnnnnnnnnnnnnnnnnnnnnnnnnnnnnnnnnnnnnnnnnnnnnnnnnnnnnnnnnnnnnnnnnnnnnnnnnnnnnnnnnnnnnnnnnnnnnnnnnnnnnnnnnnnnnnnnnnnnnnnnnnnnnnnnnnnnnnnnnnnnnnnnnnnnnnnnnnnnnnnnnnnnnnnnnnnnnnnnnnnnnnnnnnnnnnnnnnnnnnnnnnnnnnnnnnnnnnnnnnnnnnnnnnnnnnnnnnnnnnnnnnnnnnnnnnnnnnnnnnnnnnnnnnnnnnnnnnnnnnnnnnnnnnnnnnnnnnnnnnnnnnnnnnnnnnnnnnnnnnnnnnnnnnnnnnnnnnnnnnnnnnnnnnnnnnnnnnnnnnnnnnnnnnnnnnnnnnnnnnnnnnnnnnnnnnnnnnnnnnnnnnnnnnnnnnnnnnnnnnnnnnnnnnnnnnnnnnnnnnnnnnnnnnnnnnnnnnnnnnnnnnnnnnnnnnnnnnnnnnnnnnnnnnnnnnnnnnnnnnnnnnnnnnnnnnnnnnnnnnnnnnnnnnnnnnnnnnnnnnnnnnnnnnnnnnnnnnnnnnnnnnnnnnnnnnnnnnnnnnnnnnnnnnnnnnnnnnnnnnnnnnnnnnnnnnnnnnnnnnnnnnnnnnnnnnnnnnnnnnnnnnnnnnnnnnnnnnnnnnnnnnnnnnnnnnnnnnnnnnnnnnnnnnnnnnnnnnnnnnnnnnnnnnnnnnnnnnnnnnnnnnnnnnnnnnnnnnnnnnnnnnnnnnnnnnnnnnnnnnnnnnnnnnnnnnnnnnnnnnnnnnnnnnnnnnnnnnnnnnnnnnnnnnnnnnnnnnnnnnnnnnnnnnnnnnnnnnnnnnnnnnnnnnnnnnnnnnnnnnnnnnnnnnnnnnnnnnnnnnnnnnnnnnnnnnnnnnnnnnnnnnnnnnnnnnnnnnnnnnnnnnnnnnnnnnnnnnnnnnnnnnnnnnnnnnnnnnnnnnnnnnnnnnnnnnnnnnnnnnnnnnnnnnnnnnnnnnnnnnnnnnnnnnnnnnnnnnnnnnnnnnnnnnnnnnnnnnnnnnnnnnnnnnnnnnnnnnnnnnnnnnnnnnnnnnnnnnnnnnnnnnnnnnnnnnnnnnnnnnnnnnnnnnnnnnnnnnnnnnnnnnnnnnnnnnnnnnnnnnnnnnnnnnnnnnnnnnnnnnnnnnnnnnnnnnnnnnnnnnnnnnnnnnnnnnnnnnnnnnnnnnnnnnnnnnnnnnnnnnnnnnnnnnnnnnnnnnnnnnnnnnnnnnnnnnnnnnnnnnnnnnnnnnnnnnnnnnnnnnnnnnnnnnnnnnnnnnnnnnnnnnnnnnnnnnnnnnnnnnnnnnnnnnnnnnnnnnnnnnnnnnnnnnnnnnnnnnnnnnnnnnnnnnnnnnnnnnnnnnnnnnnnnnnnnnnnnnnnnnnnnnnnnnnnnnnnnnnnnnnnnnnnnnnnnnnnnnnnnnnnnnnnnnnnnnnnnnnnnnnnnnnnnnnnnnnnnnnnnnnnnnnnnnnnnnnnnnnnnnnnnnnnnnnnnnnnnnnnnnnnnnnnnnnnnnnnnnnnnnnnnnnnnnnnnnnnnnnnnnnnnnnnnnnnnnnnnnnnnnnnnnnnnnnnnnnnnnnnnnnnnnnnnnnnnnnnnnnnnnnnnnnnnnnnnnnnnnnnnnnnnnnnnnnnnnnnnnnnnnnnnnnnnnnnnnnnnnnnnnnnnnnnnnnnnnnnnnnnnnnnnnnnnnnnnnnnnnnnnnnnnnnnnnnnnnnnnnnnnnnnnnnnnnnnnnnnnnnnnnnnnnnnnnnnnnnnnnnnnnnnnnnnnnnnnnnnnnnnnnnnnnnnnnnnnnnnnnnnnnnnnnnnnnnnnnnnnnnnnnnnnnnnnnnnnnnnnnnnnnnnnnnnnnnnnnnnnnnnnnnnnnnnnnnnnnnnnnnnnnnnnnnnnnnnnnnnnnnnnnnnnnnnnnnnnnnnnnnnnnnnnnnnnnnnnnnnnnnnnnnnnnnnnnnnnnnnnnnnnnnnnnnnnnnnnnnnnnnnnnnnnnnnnnnnnnnnnnnnnnnnnnnnnnnnnnnnnnnnnnnnnnnnnnnnnnnnnnnnnnnnnnnnnnnnnnnnnnnnnnnnnnnnnnnnnnnnnnnnnnnnnnnnnnnnnnnnnnnnnnnnnnnnnnnnnnnnnnnnnnnnnnnnnnnnnnnnnnnnnnnnnnnnnnnnnnnnnnnnnnnnnnnnnnnnnnnnnnnnnnnnnnnnnnnnnnnnnnnnnnnnnnnnnnnnnnnnnnnnnnnnnnnnnnnnnnnnnnnnnnnnnnnnnnnnnnnnnnnnnnnnnnnnnnnnnnnnnnnnnnnnnnnnnnnnnnnnnnnnnnnnnnnnnnnnnnnnnnnnnnnnnnnnnnnnnnnnnnnnnnnnnnnnnnnnnnnnnnnnnnnnnnnnnnnnnnnnnnnnnnnnnnnnnnnnnnnnnnnnnnnnnnnnnnnnnnnnnnnnnnnnnnnnnnnnnnnnnnnnnnnnnnnnnnnnnnnnnnnnnnnnnnnnnnnnnnnnnnnnnnnnnnnnnnnnnnnnnnnnnnnnnnnnnnnnnnnnnnnnnnnnnnnnnnnnnnnnnnnnnnnnnnnnnnnnnnnnnnnnnnnnnnnnnnnnnnnnnnnnnnnnnnnnnnnnnnnnnnnnnnnnnnnnnnnnnnnnnnnnnnnnnnnnnnnnnnnnnnnnnnnnnnnnnnnnnnnnnnnnnnnnnnnnnnnnnnnnnnnnnnnnnnnnnnnnnnnnnnnnnnnnnnnnnnnnnnnnnnnnnnnnnnnnnnnnnnnnnnnnnnnnnnnnnnnnnnnnnnnnnnnnnnnnnnnnnnnnnnnnnnnnnnnnnnnnnnnnnnnnnnnnnnnnnnnnnnnnnnnnnnnnnnnnnnnnnnnnnnnnnnnnnnnnnnnnnnnnnnnnnnnnnnnnnnnnnnnnnnnnnnnnnnnnnnnnnnnnnnnnnnnnnnnnnnnnnnnnnnnnnnnnnnnnnnnnnnnnnnnnnnnnnnnnnnnnnnnnnnnnnnnnnnnnnnnnnnnnnnnnnnnnnnnnnnnnnnnnnnnnnnnnnnnnnnnnnnnnnnnnnnnnnnnnnnnnnnnnnnnnnnnnnnnnnnnnnnnnnnnnnnnnnnnnnnnnnnnnnnnnnnnnnnnnnnnnnnnnnnnnnnnnnnnnnnnnnnnnnnnnnnnnnnnnnnnnnnnnnnnnnnnnnnnnnnnnnnnnnnnnnnnnnnnnnnnnnnnnnnnnnnnnnnnnnnnnnnnnnnnnnnnnnnnnnnnnnnnnnnnnnnnnnnnnnnnnnnnnnnnnnnnnnnnnnnnnnnnnnnnnnnnnnnnnnnnnnnnnnnnnnnnnnnnnnnnnnnnnnnnnnnnnnnnnnnnnnnnnnnnnnnnnnnnnnnnnnnnnnnnnnnnnnnnnnnnnnnnnnnnnnnnnnnnnnnnnnnnnnnnnnnnnnnnnnnnnnnnnnnnnnnnnnnnnnnnnnnnnnnnnnnnnnnnnnnnnnnnnnnnnnnnnnnnnnnnnnnnnnnnnnnnnnnnnnnnnnnnnnnnnnnnnnnnnnnnnnnnnnnnnnnnnnnnnnnnnnnnnnnnnnnnnnnnnnnnnnnnnnnnnnnnnnnnnnnnnnnnnnnnnnnnnnnnnnnnnnnnnnnnnnnnnnnnnnnnnnnnnnnnnnnnnnnnnnnnnnnnnnnnnnnnnnnnnnnnnnnnnnnnnnnnnnnnnnnnnnnnnnnnnnnnnnnnnnnnnnnnnnnnnnnnnnnnnnnnnnnnnnnnnnnnnnnnnnnnnnnnnnnnnnnnnnnnnnnnnnnnnnnnnnnnnnnnnnnnnnnnnnnnnnnnnnnnnnnnnnnnnnnnnnnnnnnnnnnnnnnnnnnnnnnnnnnnnnnnnnnnnnnnnnnnnnnnnnnnnnnnnnnnnnnnnnnnnnnnnnnnnnnnnnnnnnnnnnnnnnnnnnnnnnnnnnnnnnnnnnnnnnnnnnnnnnnnnnnnnnnnnnnnnnnnnnnnnnnnnnnnnnnnnnnnnnnnnnnnnnnnnnnnnnnnnnnnnnnnnnnnnnnnnnnnnnnnnnnnnnnnnnnnnnnnnnnnnnnnnnnnnnnnnnnnnnnnnnnnnnnnnnnnnnnnnnnnnnnnnnnnnnnnnnnnnnnnnnnnnnnnnnnnnnnnnnnnnnnnnnnnnnnnnnnnnnnnnnnnnnnnnnnnnnnnnnnnnnnnnnnnnnnnnnnnnnnnnnnnnnnnnnnnnnnnnnnnnnnnnnnnnnnnnnnnnnnnnnnnnnnnnnnnnnnnnnnnnnnnnnnnnnnnnnnnnnnnnnnnnnnnnnnnnnnnnnnnnnnnnnnnnnnnnnnnnnnnnnnnnnnnnnnnnnnnnnnnnnnnnnnnnnnnnnnnnnnnnnnnnnnnnnnnnnnnnnnnnnnnnnnnnnnnnnnnnnnnnnnnnnnnnnnnnnnnnnnnnnnnnnnnnnnnnnnnnnnnnnnnnnnnnnnnnnnnnnnnnnnnnnnnnnnnnnnnnnnnnnnnnnnnnnnnnnnnnnnnnnnnnnnnnnnnnnnnnnnnnnnnnnnnnnnnnnnnnnnnnnnnnnnnnnnnnnnnnnnnnnnnnnnnnnnnnnnnnnnnnnnnnnnnnnnnnnnnnnnnnnnnnnnnnnnnnnnnnnnnnnnnnnnnnnnnnnnnnnnnnnnnnnnnnnnnnnnnnnnnnnnnnnnnnnnnnnnnnnnnnnnnnnnnnnnnnnnnnnnnnnnnnnnnnnnnnnnnnnnnnnnnnnnnnnnnnnnnnnnnnnnnnnnnnnnnnnnnnnnnnnnnnnnnnnnnnnnnnnnnnnnnnnnnnnnnnnnnnnnnnnnnnnnnnnnnnnnnnnnnnnnnnnnnnnnnnnnnnnnnnnnnnnnnnnnnnnnnnnnnnnnnnnnnnnnnnnnnnnnnnnnnnnnnnnnnnnnnnnnnnnnnnnnnnnnnnnnnnnnnnnnnnnnnnnnnnnnnnnnnnnnnnnnnnnnnnnnnnnnnnnnnnnnnnnnnnnnnnnnnnnnnnnnnnnnnnnnnnnnnnnnnnnnnnnnnnnnnnnnnnnnnnnnnnnnnnnnnnnnnnnnnnnnnnnnnnnnnnnnnnnnnnnnnnnnnnnnnnnnnnnnnnnnnnnnnnnnnnnnnnnnnnnnnnnnnnnnnnnnnnnnnnnnnnnnnnnnnnnnnnnnnnnnnnnnnnnnnnnnnnnnnnnnnnnnnnnnnnnnnnnnnnnnnnnnnnnnnnnnnnnnnnnnnnnnnnnnnnnnnnnnnnnnnnnnnnnnnnnnnnnnnnnnnnnnnnnnnnnnnnnnnnnnnnnnnnnnnnnnnnnnnnnnnnnnnnnnnnnnnnnnnnnnnnnnnnnnnnnnnnnnnnnnnnnnnnnnnnnnnnnnnnnnnnnnnnnnnnnnnnnnnnnnnnnnnnnnnnnnnnnnnnnnnnnnnnnnnnnnnnnnnnnnnnnnnnnnnnnnnnnnnnnnnnnnnnnnnnnnnnnnnnnnnnnnnnnnnnnnnnnnnnnnnnnnnnnnnnnnnnnnnnnnnnnnnnnnnnnnnnnnnnnnnnnnnnnnnnnnnnnnnnnnnnnnnnnnnnnnnnnnnnnnnnnnnnnnnnnnnnnnnnnnnnnnnnnnnnnnnnnnnnnnnnnnnnnnnnnnnnnnnnnnnnnnnnnnnnnnnnnnnnnnnnnnnnnnnnnnnnnnnnnnnnnnnnnnnnnnnnnnnnnnnnnnnnnnnnnnnnnnnnnnnnnnnnnnnnnnnnnnnnnnnnnnnnnnnnnnnnnnnnnnnnnnnnnnnnnnnnnnnnnnnnnnnnnnnnnnnnnnnnnnnnnnnnnnnnnnnnnnnnnnnnnnnnnnnnnnnnnnnnnnnnnnnnnnnnnnnnnnnnnnnnnnnnnnnnnnnnnnnnnnnnnnnnnnnnnnnnnnnnnnnnnnnnnnnnnnnnnnnnnnnnnnnnnnnnnnnnnnnnnnnnnnnnnnnnnnnnnnnnnnnnnnnnnnnnnnnnnnnnnnnnnnnnnnnnnnnnnnnnnnnnnnnnnnnnnnnnnnnnnnnnnnnnnnnnnnnnnnnnnnnnnnnnnnnnnnnnnnnnnnnnnnnnnnnnnnnnnnnnnnnnnnnnnnnnnnnnnnnnnnnnnnnnnnnnnnnnnnnnnnnnnnnnnnnnnnnnnnnnnnnnnnnnnnnnnnnnnnnnnnnnnnnnnnnnnnnnnnnnnnnnnnnnnnnnnnnnnnnnnnnnnnnnnnnnnnnnnnnnnnnnnnnnnnnnnnnnnnnnnnnnnnnnnnnnnnnnnnnnnnnnnnnnnnnnnnnnnnnnnnnnnnnnnnnnnnnnnnnnnnnnnnnnnnnnnnnnnnnnnnnnnnnnnnnnnnnnnnnnnnnnnnnnnnnnnnnnnnnnnnnnnnnnnnnnnnnnnnnnnnnnnnnnnnnnnnnnnnnnnnnnnnnnnnnnnnnnnnnnnnnnnnnnnnnnnnnnnnnnnnnnnnnnnnnnnnnnnnnnnnnnnnnnnnnnnnnnnnnnnnnnnnnnnnnnnnnnnnnnnnnnnnnnnnnnnnnnnnnnnnnnnnnnnnnnnnnnnnnnnnnnnnnnnnnnnnnnnnnnnnnnnnnnnnnnnnnnnnnnnnnnnnnnnnnnnnnnnnnnnnnnnnnnnnnnnnnnnnnnnnnnnnnnnnnnnnnnnnnnnnnnnnnnnnnnnnnnnnnnnnnnnnnnnnnnnnnnnnnnnnnnnnnnnnnnnnnnnnnnnnnnnnnnnnnnnnnnnnnnnnnnnnnnnnnnnnnnnnnnnnnnnnnnnnnnnnnnnnnnnnnnnnnnnnnnnnnnnnnnnnnnnnnnnnnnnnnnnnnnnnnnnnnnnnnnnnnnnnnnnnnnnnnnnnnnnnnnnnnnnnnnnnnnnnnnnnnnnnnnnnnnnnnnnnnnnnnnnnnnnnnnnnnnnnnnnnnnnnnnnnnnnnnnnnnnnnnnnnnnnnnnnnnnnnnnnnnnnnnnnnnnnnnnnnnnnnnnnnnnnnnnnnnnnnnnnnnnnnnnnnnnnnnnnnnnnnnnnnnnnnnnnnnnnnnnnnnnnnnnnnnnnnnnnnnnnnnnnnnnnnnnnnnnnnnnnnnnnnnnnnnnnnnnnnnnnnnnnnnnnnnnnnnnnnnnnnnnnnnnnnnnnnnnnnnnnnnnnnnnnnnnnnnnnnnnnnnnnnnnnnnnnnnnnnnnnnnnnnnnnnnnnnnnnnnnnnnnnnnnnnnnnnnnnnnnnnnnnnnnnnnnnnnnnnnnnnnnnnnnnnnnnnnnnnnnnnnnnnnnnnnnnnnnnnnnnnnnnnnnnnnnnnnnnnnnnnnnnnnnnnnnnnnnnnnnnnnnnnnnnnnnnnnnnnnnnnnnnnnnnnnnnnnnnnnnnnnnnnnnnnnnnnnnnnnnnnnnnnnnnnnnnnnnnnnnnnnnnnnnnnnnnnnnnnnnnnnnnnnnnnnnnnnnnnnnnnnnnnnnnnnnnnnnnnnnnnnnnnnnnnnnnnnnnnnnnnnnnnnnnnnnnnnnnnnnnnnnnnnnnnnnnnnnnnnnnnnnnnnnnnnnnnnnnnnnnnnnnnnnnnnnnnnnnnnnnnnnnnnnnnnnnnnnnnnnnnnnnnnnnnnnnnnnnnnnnnnnnnnnnnnnnnnnnnnnnnnnnnnnnnnnnnnnnnnnnnnnnnnnnnnnnnnnnnnnnnnnnnnnnnnnnnnnnnnnnnnnnnnnnnnnnnnnnnnnnnnnnnnnnnnnnnnnnnnnnnnnnnnnnnnnnnnnnnnnnnnnnnnnnnnnnnnnnnnnnnnnnnnnnnnnnnnnnnnnnnnnnnnnnnnnnnnnnnnnnnnnnnnnnnnnnnnnnnnnnnnnnnnnnnnnnnnnnnnnnnnnnnnnnnnnnnnnnnnnnnnnnnnnnnnnnnnnnnnnnnnnnnnnnnnnnnnnnnnnnnnnnnnnnnnnnnnnnnnnnnnnnnnnnnnnnnnnnnnnnnnnnnnnnnnnnnnnnnnnnnnnnnnnnnnnnnnnnnnnnnnnnnnnnnnnnnnnnnnnnnnnnnnnnnnnnnnnnnnnnnnnnnnnnnnnnnnnnnnnnnnnnnnnnnnnnnnnnnnnnnnnnnnnnnnnnnnnnnnnnnnnnnnnnnnnnnnnnnnnnnnnnnnnnnnnnnnnnnnnnnnnnnnnnnnnnnnnnnnnnnnnnnnnnnnnnnnnnnnnnnnnnnnnnnnnnnnnnnnnnnnnnnnnnnnnnnnnnnnnnnnnnnnnnnnnnnnnnnnnnnnnnnnnnnnnnnnnnnnnnnnnnnnnnnnnnnnnnnnnnnnnnnnnnnnnnnnnnnnnnnnnnnnnnnnnnnnnnnnnnnnnnnnnnnnnnnnnnnnnnnnnnnnnnnnnnnnnnnnnnnnnnnnnnnnnnnnnnnnnnnnnnnnnnnnnnnnnnnnnnnnnnnnnnnnnnnnnnnnnnnnnnnnnnnnnnnnnnnnnnnnnnnnnnnnnnnnnnnnnnnnnnnnnnnnnnnnnnnnnnnnnnnnnnnnnnnnnnnnnnnnnnnnnnnnnnnnnnnnnnnnnnnnnnnnnnnnnnnnnnnnnnnnnnnnnnnnnnnnnnnnnnnnnnnnnnnnnnnnnnnnnnnnnnnnnnnnnnnnnnnnnnnnnnnnnnnnnnnnnnnnnnnnnnnnnnnnnnnnnnnnnnnnnnnnnnnnnnnnnnnnnnnnnnnnnnnnnnnnnnnnnnnnnnnnnnnnnnnnnnnnnnnnnnnnnnnnnnnnnnnnnnnnnnnnnnnnnnnnnnnnnnnnnnnnnnnnnnnnnnnnnnnnnnnnnnnnnnnnnnnnnnnnnnnnnnnnnnnnnnnnnnnnnnnnnnnnnnnnnnnnnnnnnnnnnnnnnnnnnnnnnnnnnnnnnnnnnnnnnnnnnnnnnnnnnnnnnnnnnnnnnnnnnnnnnnnnnnnnnnnnnnnnnnnnnnnnnnnnnnnnnnnnnnnnnnnnnnnnnnnnnnnnnnnnnnnnnnnnnnnnnnnnnnnnnnnnnnnnnnnnnnnnnnnnnnnnnnnnnnnnnnnnnnnnnnnnnnnnnnnnnnnnnnnnnnnnnnnnnnnnnnnnnnnnnnnnnnnnnnnnnnnnnnnnnnnnnnnnnnnnnnnnnnnnnnnnnnnnnnnnnnnnnnnnnnnnnnnnnnnnnnnnnnnnnnnnnnnnnnnnnnnnnnnnnnnnnnnnnnnnnnnnnnnnnnnnnnnnnnnnnnnnnnnnnnnnnnnnnnnnnnnnnnnnnnnnnnnnnnnnnnnnnnnnnnnnnnnnnnnnnnnnnnnnnnnnnnnnnnnnnnnnnnnnnnnnnnnnnnnnnnnnnnnnnnnnnnnnnnnnnnnnnnnnnnnnnnnnnnnnnnnnnnnnnnnnnnnnnnnnnnnnnnnnnnnnnnnnnnnnnnnnnnnnnnnnnnnnnnnnnnnnnnnnnnnnnnnnnnnnnnnnnnnnnnnnnnnnnnnnnnnnnnnnnnnnnnnnnnnnnnnnnnnnnnnnnnnnnnnnnnnnnnnnnnnnnnnnnnnnnnnnnnnnnnnnnnnnnnnnnnnnnnnnnnnnnnnnnnnnnnnnnnnnnnnnnnnnnnnnnnnnnnnnnnnnnnnnnnnnnnnnnnnnnnnnnnnnnnnnnnnnnnnnnnnnnnnnnnnnnnnnnnnnnnnnnnnnnnnnnnnnnnnnnnnnnnnnnnnnnnnnnnnnnnnnnnnnnnnnnnnnnnnnnnnnnnnnnnnnnnnnnnnnnnnnnnnnnnnnnnnnnnnnnnnnnnnnnnnnnnnnnnnnnnnnnnnnnnnnnnnnnnnnnnnnnnnnnnnnnnnnnnnnnnnnnnnnnnnnnnnnnnnnnnnnnnnnnnnnnnnnnnnnnnnnnnnnnnnnnnnnnnnnnnnnnnnnnnnnnnnnnnnnnnnnnnnnnnnnnnnnnnnnnnnnnnnnnnnnnnnnnnnnnnnnnnnnnnnnnnnnnnnnnnnnnnnnnnnnnnnnnnnnnnnnnnnnnnnnnnnnnnnnnnnnnnnnnnnnnnnnnnnnnnnnnnnnnnnnnnnnnnnnnnnnnnnnnnnnnnnnnnnnnnnnnnnnnnnnnnnnnnnnnnnnnnnnnnnnnnnnnnnnnnnnnnnnnnnnnnnnnnnnnnnnnnnnnnnnnnnnnnnnnnnnnnnnnnnnnnnnnnnnnnnnnnnnnnnnnnnnnnnnnnnnnnnnnnnnnnnnnnnnnnnnnnnnnnnnnnnnnnnnnnnnnnnnnnnnnnnnnnnnnnnnnnnnnnnnnnnnnnnnnnnnnnnnnnnnnnnnnnnnnnnnnnnnnnnnnnnnnnnnnnnnnnnnnnnnnnnnnnnnnnnnnnnnnnnnnnnnnnnnnnnnnnnnnnnnnnnnnnnnnnnnnnnnnnnnnnnnnnnnnnnnnnnnnnnnnnnnnnnnnnnnnnnnnnnnnnnnnnnnnnnnnnnnnnnnnnnnnnnnnnnnnnnnnnnnnnnnnnnnnnnnnnnnnnnnnnnnnnnnnnnnnnnnnnnnnnnnnnnnnnnnnnnnnnnnnnnnnnnnnnnnnnnnnnnnnnnnnnnnnnnnnnnnnnnnnnnnnnnnnnnnnnnnnnnnnnnnnnnnnnnnnnnnnnnnnnnnnnnnnnnnnnnnnnnnnnnnnnnnnnnnnnnnnnnnnnnnnnnnnnnnnnnnnnnnnnnnnnnnnnnnnnnnnnnnnnnnnnnnnnnnnnnnnnnnnnnnnnnnnnnnnnnnnnnnnnnnnnnnnnnnnnnnnnnnnnnnnnnnnnnnnnnnnnnnnnnnnnnnnnnnnnnnnnnnnnnnnnnnnnnnnnnnnnnnnnnnnnnnnnnnnnnnnnnnnnnnnnnnnnnnnnnnnnnnnnnnnnnnnnnnnnnnnnnnnnnnnnnnnnnnnnnnnnnnnnnnnnnnnnnnnnnnnnnnnnnnnnnnnnnnnnnnnnnnnnnnnnnnnnnnnnnnnnnnnnnnnnnnnnnnnnnnnnnnnnnnnnnnnnnnnnnnnnnnnnnnnnnnnnnnnnnnnnnnnnnnnnnnnnnnnnnnnnnnnnnnnnnnnnnnnnnnnnnnnnnnnnnnnnnnnnnnnnnnnnnnnnnnnnnnnnnnnnnnnnnnnnnnnnnnnnnnnnnnnnnnnnnnnnnnnnnnnnnnnnnnnnnnnnnnnnnnnnnnnnnnnnnnnnnnnnnnnnnnnnnnnnnnnnnnnnnnnnnnnnnnnnnnnnnnnnnnnnnnnnnnnnnnnnnnnnnnnnnnnnnnnnnnnnnnnnnnnnnnnnnnnnnnnnnnnnnnnnnnnnnnnnnnnnnnnnnnnnnnnnnnnnnnnnnnnnnnnnnnnnnnnnnnnnnnnnnnnnnnnnnnnnnnnnnnnnnnnnnnnnnnnnnnnnnnnnnnnnnnnnnnnnnnnnnnnnnnnnnnnnnnnnnnnnnnnnnnnnnnnnnnnnnnnnnnnnnnnnnnnnnnnnnnnnnnnnnnnnnnnnnnnnnnnnnnnnnnnnnnnnnnnnnnnnnnnnnnnnnnnnnnnnnnnnnnnnnnnnnnnnnnnnnnnnnnnnnnnnnnnnnnnnnnnnnnnnnnnnnnnnnnnnnnnnnnnnnnnnnnnnnnnnnnnnnnnnnnnnnnnnnnnnnnnnnnnnnnnnnnnnnnnnnnnnnnnnnnnnnnnnnnnnnnnnnnnnnnnnnnnnnnnnnnnnnnnnnnnnnnnnnnnnnnnnnnnnnnnnnnnnnnnnnnnnnnnnnnnnnnnnnnnnnnnnnnnnnnnnnnnnnnnnnnnnnnnnnnnnnnnnnnnnnnnnnnnnnnnnnnnnnnnnnnnnnnnnnnnnnnnnnnnnnnnnnnnnnnnnnnnnnnnnnnnnnnnnnnnnnnnnnnnnnnnnnnnnnnnnnnnnnnnnnnnnnnnnnnnnnnnnnnnnnnnnnnnnnnnnnnnnnnnnnnnnnnnnnnnnnnnnnnnnnnnnnnnnnnnnnnnnnnnnnnnnnnnnnnnnnnnnnnnnnnnnnnnnnnnnnnnnnnnnnnnnnnnnnnnnnnnnnnnnnnnnnnnnnnnnnnnnnnnnnnnnnnnnnnnnnnnnnnnnnnnnnnnnnnnnnnnnnnnnnnnnnnnnnnnnnnnnnnnnnnnnnnnnnnnnnnnnnnnnnnnnnnnnnnnnnnnnnnnnnnnnnnnnnnnnnnnnnnnnnnnnnnnnnnnnnnnnnnnnnnnnnnnnnnnnnnnnnnnnnnnnnnnnnnnnnnnnnnnnnnnnnnnnnnnnnnnnnnnnnnnnnnnnnnnnnnnnnnnnnnnnnnnnnnnnnnnnnnnnnnnnnnnnnnnnnnnnnnnnnnnnnnnnnnnnnnnnnnnnnnnnnnnnnnnnnnnnnnnnnnnnnnnnnnnnnnnnnnnnnnnnnnnnnnnnnnnnnnnnnnnnnnnnnnnnnnnnnnnnnnnnnnnnnnnnnnnnnnnnnnnnnnnnnnnnnnnnnnnnnnnnnnnnnnnnnnnnnnnnnnnnnnnnnnnnnnnnnnnnnnnnnnnnnnnnnnnnnnnnnnnnnnnnnnnnnnnnnnnnnnnnnnnnnnnnnnnnnnnnnnnnnnnnnnnnnnnnnnnnnnnnnnnnnnnnnnnnnnnnnnnnnnnnnnnnnnnnnnnnnnnnnnnnnnnnnnnnnnnnnnnnnnnnnnnnnnnnnnnnnnnnnnnnnnnnnnnnnnnnnnnnnnnnnnnnnnnnnnnnnnnnnnnnnnnnnnnnnnnnnnnnnnnnnnnnnnnnnnnnnnnnnnnnnnnnnnnnnnnnnnnnnnnnnnnnnnnnnnnnnnnnnnnnnnnnnnnnnnnnnnnnnnnnnnnnnnnnnnnnnnnnnnnnnnnnnnnnnnnnnnnnnnnnnnnnnnnnnnnnnnnnnnnnnnnnnnnnnnnnnnnnnnnnnnnnnnnnnnnnnnnnnnnnnnnnnnnnnnnnnnnnnnnnnnnnnnnnnnnnnnnnnnnnnnnnnnnnnnnnnnnnnnnnnnnnnnnnnnnnnnnnnnnnnnnnnnnnnnnnnnnnnnnnnnnnnnnnnnnnnnnnnnnnnnnnnnnnnnnnnnnnnnnnnnnnnnnnnnnnnnnnnnnnnnnnnnnnnnnnnnnnnnnnnnnnnnnnnnnnnnnnnnnnnnnnnnnnnnnnnnnnnnnnnnnnnnnnnnnnnnnnnnnnnnnnnnnnnnnnnnnnnnnnnnnnnnnnnnnnnnnnnnnnnnnnnnnnnnnnnnnnnnnnnnnnnnnnnnnnnnnnnnnnnnnnnnnnnnnnnnnnnnnnnnnnnnnnnnnnnnnnnnnnnnnnnnnnnnnnnnnnnnnnnnnnnnnnnnnnnnnnnnnnnnnnnnnnnnnnnnnnnnnnnnnnnnnnnnnnnnnnnnnnnnnnnnnnnnnnnnnnnnnnnnnnnnnnnnnnnnnnnnnnnnnnnnnnnnnnnnnnnnnnnnnnnnnnnnnnnnnnnnnnnnnnnnnnnnnnnnnnnnnnnnnnnnnnnnnnnnnnnnnnnnnnnnnnnnnnnnnnnnnnnnnnnnnnnnnnnnnnnnnnnnnnnnnnnnnnnnnnnnnnnnnnnnnnnnnnnnnnnnnnnnnnnnnnnnnnnnnnnnnnnnnnnnnnnnnnnnnnnnnnnnnnnnnnnnnnnnnnnnnnnnnnnnnnnnnnnnnnnnnnnnnnnnnnnnnnnnnnnnnnnnnnnnnnnnnnnnnnnnnnnnnnnnnnnnnnnnnnnnnnnnnnnnnnnnnnnnnnnnnnnnnnnnnnnnnnnnnnnnnnnnnnnnnnnnnnnnnnnnnnnnnnnnnnnnnnnnnnnnnnnnnnnnnnnnnnnnnnnnnnnnnnnnnnnnnnnnnnnnnnnnnnnnnnnnnnnnnnnnnnnnnnnnnnnnnnnnnnnnnnnnnnnnnnnnnnnnnnnnnnnnnnnnnnnnnnnnnnnnnnnnnnnnnnnnnnnnnnnnnnnnnnnnnnnnnnnnnnnnnnnnnnnnnnnnnnnnnnnnnnnnnnnnnnnnnnnnnnnnnnnnnnnnnnnnnnnnnnnnnnnnnnnnnnnnnnnnnnnnnnnnnnnnnnnnnnnnnnnnnnnnnnnnnnnnnnnnnnnnnnnnnnnnnnnnnnnnnnnnnnnnnnnnnnnnnnnnnnnnnnnnnnnnnnnnnnnnnnnnnnnnnnnnnnnnnnnnnnnnnnnnnnnnnnnnnnnnnnnnnnnnnnnnnnnnnnnnnnnnnnnnnnnnnnnnnnnnnnnnnnnnnnnnnnnnnnnnnnnnnnnnnnnnnnnnnnnnnnnnnnnnnnnnnnnnnnnnnnnnnnnnnnnnnnnnnnnnnnnnnnnnnnnnnnnnnnnnnnnnnnnnnnnnnnnnnnnnnnnnnnnnnnnnnnnnnnnnnnnnnnnnnnnnnnnnnnnnnnnnnnnnnnnnnnnnnnnnnnnnnnnnnnnnnnnnnnnnnnnnnnnnnnnnnnnnnnnnnnnnnnnnnnnnnnnnnnnnnnnnnnnnnnnnnnnnnnnnnnnnnnnnnnnnnnnnnnnnnnnnnnnnnnnnnnnnnnnnnnnnnnnnnnnnnnnnnnnnnnnnnnnnnnnnnnnnnnnnnnnnnnnnnnnnnnnnnnnnnnnnnnnnnnnnnnnnnnnnnnnnnnnnnnnnnnnnnnnnnnnnnnnnnnnnnnnnnnnnnnnnnnnnnnnnnnnnnnnnnnnnnnnnnnnnnnnnnnnnnnnnnnnnnnnnnnnnnnnnnnnnnnnnnnnnnnnnnnnnnnnnnnnnnnnnnnnnnnnnnnnnnnnnnnnnnnnnnnnnnnnnnnnnnnnnnnnnnnnnnnnnnnnnnnnnnnnnnnnnnnnnnnnnnnnnnnnnnnnnnnnnnnnnnnnnnnnnnnnnnnnnnnnnnnnnnnnnnnnnnnnnnnnnnnnnnnnnnnnnnnnnnnnnnnnnnnnnnnnnnnnnnnnnnnnnnnnnnnnnnnnnnnnnnnnnnnnnnnnnnnnnnnnnnnnnnnnnnnnnnnnnnnnnnnnnnnnnnnnnnnnnnnnnnnnnnnnnnnnnnnnnnnnnnnnnnnnnnnnnnnnnnnnnnnnnnnnnnnnnnnnnnnnnnnnnnnnnnnnnnnnnnnnnnnnnnnnnnnnnnnnnnnnnnnnnnnnnnnnnnnnnnnnnnnnnnnnnnnnnnnnnnnnnnnnnnnnnnnnnnnnnnnnnnnnnnnnnnnnnnnnnnnnnnnnnnnnnnnnnnnnnnnnnnnnnnnnnnnnnnnnnnnnnnnnnnnnnnnnnnnnnnnnnnnnnnnnnnnnnnnnnnnnnnnnnnnnnnnnnnnnnnnnnnnnnnnnnnnnnnnnnnnnnnnnnnnnnnnnnnnnnnnnnnnnnnnnnnnnnnnnnnnnnnnnnnnnnnnnnnnnnnnnnnnnnnnnnnnnnnnnnnnnnnnnnnnnnnnnnnnnnnnnnnnnnnnnnnnnnnnnnnnnnnnnnnnnnnnnnnnnnnnnnnnnnnnnnnnnnnnnnnnnnnnnnnnnnnnnnnnnnnnnnnnnnnnnnnnnnnnnnnnnnnnnnnnnnnnnnnnnnnnnnnnnnnnnnnnnnnnnnnnnnnnnnnnnnnnnnnnnnnnnnnnnnnnnnnnnnnnnnnnnnnnnnnnnnnnnnnnnnnnnnnnnnnnnnnnnnnnnnnnnnnnnnnnnnnnnnnnnnnnnnnnnnnnnnnnnnnnnnnnnnnnnnnnnnnnnnnnnnnnnnnnnnnnnnnnnnnnnnnnnnnnnnnnnnnnnnnnnnnnnnnnnnnnnnnnnnnnnnnnnnnnnnnnnnnnnnnnnnnnnnnnnnnnnnnnnnnnnnnnnnnnnnnnnnnnnnnnnnnnnnnnnnnnnnnnnnnnnnnnnnnnnnnnnnnnnnnnnnnnnnnnnnnnnnnnnnnnnnnnnnnnnnnnnnnnnnnnnnnnnnnnnnnnnnnnnnnnnnnnnnnnnnnnnnnnnnnnnnnnnnnnnnnnnnnnnnnnnnnnnnnnnnnnnnnnnnnnnnnnnnnnnnnnnnnnnnnnnnnnnnnnnnnnnnnnnnnnnnnnnnnnnnnnnnnnnnnnnnnnnnnnnnnnnnnnnnnnnnnnnnnnnnnnnnnnnnnnnnnnnnnnnnnnnnnnnnnnnnnnnnnnnnnnnnnnnnnnnnnnnnnnnnnnnnnnnnnnnnnnnnnnnnnnnnnnnnnnnnnnnnnnnnnnnnnnnnnnnnnnnnnnnnnnnnnnnnnnnnnnnnnnnnnnnnnnnnnnnnnnnnnnnnnnnnnnnnnnnnnnnnnnnnnnnnnnnnnnnnnnnnnnnnnnnnnnnnnnnnnnnnnnnnnnnnnnnnnnnnnnnnnnnnnnnnnnnnnnnnnnnnnnnnnnnnnnnnnnnnnnnnnnnnnnnnnnnnnnnnnnnnnnnnnnnnnnnnnnnnnnnnnnnnnnnnnnnnnnnnnnnnnnnnnnnnnnnnnnnnnnnnnnnnnnnnnnnnnnnnnnnnnnnnnnnnnnnnnnnnnnnnnnnnnnnnnnnnnnnnnnnnnnnnnnnnnnnnnnnnnnnnnnnnnnnnnnnnnnnnnnnnnnnnnnnnnnnnnnnnnnnnnnnnnnnnnnnnnnnnnnnnnnnnnnnnnnnnnnnnnnnnnnnnnnnnnnnnnnnnnnnnnnnnnnnnnnnnnnnnnnnnnnnnnnnnnnnnnnnnnnnnnnnnnnnnnnnnnnnnnnnnnnnnnnnnnnnnnnnnnnnnnnnnnnnnnnnnnnnnnnnnnnnnnnnnnnnnnnnnnnnnnnnnnnnnnnnnnnnnnnnnnnnnnnnnnnnnnnnnnnnnnnnnnnnnnnnnnnnnnnnnnnnnnnnnnnnnnnnnnnnnnnnnnnnnnnnnnnnnnnnnnnnnnnnnnnnnnnnnnnnnnnnnnnnnnnnnnnnnnnnnnnnnnnnnnnnnnnnnnnnnnnnnnnnnnnnnnnnnnnnnnnnnnnnnnnnnnnnnnnnnnnnnnnnnnnnnnnnnnnnnnnnnnnnnnnnnnnnnnnnnnnnnnnnnnnnnnnnnnnnnnnnnnnnnnnnnnnnnnnnnnnnnnnnnnnnnnnnnnnnnnnnnnnnnnnnnnnnnnnnnnnnnnnnnnnnnnnnnnnnnnnnnnnnnnnnnnnnnnnnnnnnnnnnnnnnnnnnnnnnnnnnnnnnnnnnnnnnnnnnnnnnnnnnnnnnnnnnnnnnnnnnnnnnnnnnnnnnnnnnnnnnnnnnnnnnnnnnnnnnnnnnnnnnnnnnnnnnnnnnnnnnnnnnnnnnnnnnnnnnnnnnnnnnnnnnnnnnnnnnnnnnnnnnnnnnnnnnnnnnnnnnnnnnnnnnnnnnnnnnnnnnnnnnnnnnnnnnnnnnnnnnnnnnnnnnnnnnnnnnnnnnnnnnnnnnnnnnnnnnnnnnnnnnnnnnnnnnnnnnnnnnnnnnnnnnnnnnnnnnnnnnnnnnnnnnnnnnnnnnnnnnnnnnnnnnnnnnnnnnnnnnnnnnnnnnnnnnnnnnnnnnnnnnnnnnnnnnnnnnnnnnnnnnnnnnnnnnnnnnnnnnnnnnnnnnnnnnnnnnnnnnnnnnnnnnnnnnnnnnnnnnnnnnnnnnnnnnnnnnnnnnnnnnnnnnnnnnnnnnnnnnnnnnnnnnnnnnnnnnnnnnnnnnnnnnnnnnnnnnnnnnnnnnnnnnnnnnnnnnnnnnnnnnnnnnnnnnnnnnnnnnnnnnnnnnnnnnnnnnnnnnnnnnnnnnnnnnnnnnnnnnnnnnnnnnnnnnnnnnnnnnnnnnnnnnnnnnnnnnnnnnnnnnnnnnnnnnnnnnnnnnnnnnnnnnnnnnnnnnnnnnnnnnnnnnnnnnnnnnnnnnnnnnnnnnnnnnnnnnnnnnnnnnnnnnnnnnnnnnnnnnnnnnnnnnnnnnnnnnnnnnnnnnnnnnnnnnnnnnnnnnnnnnnnnnnnnnnnnnnnnnnnnnnnnnnnnnnnnnnnnnnnnnnnnnnnnnnnnnnnnnnnnnnnnnnnnnnnnnnnnnnnnnnnnnnnnnnnnnnnnnnnnnnnnnnnnnnnnnnnnnnnnnnnnnnnnnnnnnnnnnnnnnnnnnnnnnnnnnnnnnnnnnnnnnnnnnnnnnnnnnnnnnnnnnnnnnnnnnnnnnnnnnnnnnnnnnnnnnnnnnnnnnnnnnnnnnnnnnnnnnnnnnnnnnnnnnnnnnnnnnnnnnnnnnnnnnnnnnnnnnnnnnnnnnnnnnnnnnnnnnnnnnnnnnnnnnnnnnnnnnnnnnnnnnnnnnnnnnnnnnnnnnnnnnnnnnnnnnnnnnnnnnnnnnnnnnnnnnnnnnnnnnnnnnnnnnnnnnnnnnnnnnnnnnnnnnnnnnnnnnnnnnnnnnnnnnnnnnnnnnnnnnnnnnnnnnnnnnnnnnnnnnnnnnnnnnnnnnnnnnnnnnnnnnnnnnnnnnnnnnnnnnnnnnnnnnnnnnnnnnnnnnnnnnnnnnnnnnnnnnnnnnnnnnnnnnnnnnnnnnnnnnnnnnnnnnnnnnnnnnnnnnnnnnnnnnnnnnnnnnnnnnnnnnnnnnnnnnnnnnnnnnnnnnnnnnnnnnnnnnnnnnnnnnnnnnnnnnnnnnnnnnnnnnnnnnnnnnnnnnnnnnnnnnnnnnnnnnnnnnnnnnnnnnnnnnnnnnnnnnnnnnnnnnnnnnnnnnnnnnnnnnnnnnnnnnnnnnnnnnnnnnnnnnnnnnnnnnnnnnnnnnnnnnnnnnnnnnnnnnnnnnnnnnnnnnnnnnnnnnnnnnnnnnnnnnnnnnnnnnnnnnnnnnnnnnnnnnnnnnnnnnnnnnnnnnnnnnnnnnnnnnnnnnnnnnnnnnnnnnnnnnnnnnnnnnnnnnnnnnnnnnnnnnnnnnnnnnnnnnnnnnnnnnnnnnnnnnnnnnnnnnnnnnnnnnnnnnnnnnnnnnnnnnnnnnnnnnnnnnnnnnnnnnnnnnnnnnnnnnnnnnnnnnnnnnnnnnnnnnnnnnnnnnnnnnnnnnnnnnnnnnnnnnnnnnnnnnnnnnnnnnnnnnnnnnnnnnnnnnnnnnnnnnnnnnnnnnnnnnnnnnnnnnnnnnnnnnnnnnnnnnnnnnnnnnnnnnnnnnnnnnnnnnnnnnnnnnnnnnnnnnnnnnnnnnnnnnnnnnnnnnnnnnnnnnnnnnnnnnnnnnnnnnnnnnnnnnnnnnnnnnnnnnnnnnnnnnnnnnnnnnnnnnnnnnnnnnnnnnnnnnnnnnnnnnnnnnnnnnnnnnnnnnnnnnnnnnnnnnnnnnnnnnnnnnnnnnnnnnnnnnnnnnnnnnnnnnnnnnnnnnnnnnnnnnnnnnnnnnnnnnnnnnnnnnnnnnnnnnnnnnnnnnnnnnnnnnnnnnnnnnnnnnnnnnnnnnnnnnnnnnnnnnnnnnnnnnnnnnnnnnnnnnnnnnnnnnnnnnnnnnnnnnnnnnnnnnnnnnnnnnnnnnnnnnnnnnnnnnnnnnnnnnnnnnnnnnnnnnnnnnnnnnnnnnnnnnnnnnnnnnnnnnnnnnnnnnnnnnnnnnnnnnnnnnnnnnnnnnnnnnnnnnnnnnnnnnnnnnnnnnnnnnnnnnnnnnnnnnnnnnnnnnnnnnnnnnnnnnnnnnnnnnnnnnnnnnnnnnnnnnnnnnnnnnnnnnnnnnnnnnnnnnnnnnnnnnnnnnnnnnnnnnnnnnnnnnnnnnnnnnnnnnnnnnnnnnnnnnnnnnnnnnnnnnnnnnnnnnnnnnnnnnnnnnnnnnnnnnnnnnnnnnnnnnnnnnnnnnnnnnnnnnnnnnnnnnnnnnnnnnnnnnnnnnnnnnnnnnnnnnnnnnnnnnnnnnnnnnnnnnnnnnnnnnnnnnnnnnnnnnnnnnnnnnnnnnnnnnnnnnnnnnnnnnnnnnnnnnnnnnnnnnnnnnnnnnnnnnnnnnnnnnnnnnnnnnnnnnnnnnnnnnnnnnnnnnnnnnnnnnnnnnnnnnnnnnnnnnnnnnnnnnnnnnnnnnnnnnnnnnnnnnnnnnnnnnnnnnnnnnnnnnnnnnnnnnnnnnnnnnnnnnnnnnnnnnnnnnnnnnnnnnnnnnnnnnnnnnnnnnnnnnnnnnnnnnnnnnnnnnnnnnnnnnnnnnnnnnnnnnnnnnnnnnnnnnnnnnnnnnnnnnnnnnnnnnnnnnnnnnnnnnnnnnnnnnnnnnnnnnnnnnnnnnnnnnnnnnnnnnnnnnnnnnnnnnnnnnnnnnnnnnnnnnnnnnnnnnnnnnnnnnnnnnnnnnnnnnnnnnnnnnnnnnnnnnnnnnnnnnnnnnnnnnnnnnnnnnnnnnnnnnnnnnnnnnnnnnnnnnnnnnnnnnnnnnnnnnnnnnnnnnnnnnnnnnnnnnnnnnnnnnnnnnnnnnnnnnnnnnnnnnnnnnnnnnnnnnnnnnnnnnnnnnnnnnnnnnnnnnnnnnnnnnnnnnnnnnnnnnnnnnnnnnnnnnnnnnnnnnnnnnnnnnnnnnnnnnnnnnnnnnnnnnnnnnnnnnnnnnnnnnnnnnnnnnnnnnnnnnnnnnnnnnnnnnnnnnnnnnnnnnnnnnnnnnnnnnnnnnnnnnnnnnnnnnnnnnnnnnnnnnnnnnnnnnnnnnnnnnnnnnnnnnnnnnnnnnnnnnnnnnnnnnnnnnnnnnnnnnnnnnnnnnnnnnnnnnnnnnnnnnnnnnnnnnnnnnnnnnnnnnnnnnnnnnnnnnnnnnnnnnnnnnnnnnnnnnnnnnnnnnnnnnnnnnnnnnnnnnnnnnnnnnnnnnnnnnnnnnnnnnnnnnnnnnnnnnnnnnnnnnnnnnnnnnnnnnnnnnnnnnnnnnnnnnnnnnnnnnnnnnnnnnnnnnnnnnnnnnnnnnnnnnnnnnnnnnnnnnnnnnnnnnnnnnnnnnnnnnnnnnnnnnnnnnnnnnnnnnnnnnnnnnnnnnnnnnnnnnnnnnnnnnnnnnnnnnnnnnnnnnnnnnnnnnnnnnnnnnnnnnnnnnnnnnnnnnnnnnnnnnnnnnnnnnnnnnnnnnnnnnnnnnnnnnnnnnnnnnnnnnnnnnnnnnnnnnnnnnnnnnnnnnnnnnnnnnnnnnnnnnnnnnnnnnnnnnnnnnnnnnnnnnnnnnnnnnnnnnnnnnnnnnnnnnnnnnnnnnnnnnnnnnnnnnnnnnnnnnnnnnnnnnnnnnnnnnnnnnnnnnnnnnnnnnnnnnnnnnnnnnnnnnnnnnnnnnnnnnnnnnnnnnnnnnnnnnnnnnnnnnnnnnnnnnnnnnnnnnnnnnnnnnnnnnnnnnnnnnnnnnnnnnnnnnnnnnnnnnnnnnnnnnnnnnnnnnnnnnnnnnnnnnnnnnnnnnnnnnnnnnnnnnnnnnnnnnnnnnnnnnnnnnnnnnnnnnnnnnnnnnnnnnnnnnnnnnnnnnnnnnnnnnnnnnnnnnnnnnnnnnnnnnnnnnnnnnnnnnnnnnnnnnnnnnnnnnnnnnnnnnnnnnnnnnnnnnnnnnnnnnnnnnnnnnnnnnnnnnnnnnnnnnnnnnnnnnnnnnnnnnnnnnnnnnnnnnnnnnnnnnnnnnnnnnnnnnnnnnnnnnnnnnnnnnnnnnnnnnnnnnnnnnnnnnnnnnnnnnnnnnnnnnnnnnnnnnnnnnnnnnnnnnnnnnnnnnnnnnnnnnnnnnnnnnnnnnnnnnnnnnnnnnnnnnnnnnnnnnnnnnnnnnnnnnnnnnnnnnnnnnnnnnnnnnnnnnnnnnnnnnnnnnnnnnnnnnnnnnnnnnnnnnnnnnnnnnnnnnnnnnnnnnnnnnnnnnnnnnnnnnnnnnnnnnnnnnnnnnnnnnnnnnnnnnnnnnnnnnnnnnnnnnnnnnnnnnnnnnnnnnnnnnnnnnnnnnnnnnnnnnnnnnnnnnnnnnnnnnnnnnnnnnnnnnnnnnnnnnnnnnnnnnnnnnnnnnnnnnnnnnnnnnnnnnnnnnnnnnnnnnnnnnnnnnnnnnnnnnnnnnnnnnnnnnnnnnnnnnnnnnnnnnnnnnnnnnnnnnnnnnnnnnnnnnnnnnnnnnnnnnnnnnnnnnnnnnnnnnnnnnnnnnnnnnnnnnnnnnnnnnnnnnnnnnnnnnnnnnnnnnnnnnnnnnnnnnnnnnnnnnnnnnnnnnnnnnnnnnnnnnnnnnnnnnnnnnnnnnnnnnnnnnnnnnnnnnnnnnnnnnnnnnnnnnnnnnnnnnnnnnnnnnnnnnnnnnnnnnnnnnnnnnnnnnnnnnnnnnnnnnnnnnnnnnnnnnnnnnnnnnnnnnnnnnnnnnnnnnnnnnnnnnnnnnnnnnnnnnnnnnnnnnnnnnnnnnnnnnnnnnnnnnnnnnnnnnnnnnnnnnnnnnnnnnnnnnnnnnnnnnnnnnnnnnnnnnnnnnnnnnnnnnnnnnnnnnnnnnnnnnnnnnnnnnnnnnnnnnnnnnnnnnnnnnnnnnnnnnnnnnnnnnnnnnnnnnnnnnnnnnnnnnnnnnnnnnnnnnnnnnnnnnnnnnnnnnnnnnnnnnnnnnnnnnnnnnnnnnnnnnnnnnnnnnnnnnnnnnnnnnnnnnnnnnnnnnnnnnnnnnnnnnnnnnnnnnnnnnnnnnnnnnnnnnnnnnnnnnnnnnnnnnnnnnnnnnnnnnnnnnnnnnnnnnnnnnnnnnnnnnnnnnnnnnnnnnnnnnnnnnnnnnnnnnnnnnnnnnnnnnnnnnnnnnnnnnnnnnnnnnnnnnnnnnnnnnnnnnnnnnnnnnnnnnnnnnnnnnnnnnnnnnnnnnnnnnnnnnnnnnnnnnnnnnnnnnnnnnnnnnnnnnnnnnnnnnnnnnnnnnnnnnnnnnnnnnnnnnnnnnnnnnnnnnnnnnnnnnnnnnnnnnnnnnnnnnnnnnnnnnnnnnnnnnnnnnnnnnnnnnnnnnnnnnnnnnnnnnnnnnnnnnnnnnnnnnnnnnnnnnnnnnnnnnnnnnnnnnnnnnnnnnnnnnnnnnnnnnnnnnnnnnnnnnnnnnnnnnnnnnnnnnnnnnnnnnnnnnnnnnnnnnnnnnnnnnnnnnnnnnnnnnnnnnnnnnnnnnnnnnnnnnnnnnnnnnnnnnnnnnnnnnnnnnnnnnnnnnnnnnnnnnnnnnnnnnnnnnnnnnnnnnnnnnnnnnnnnnnnnnnnnnnnnnnnnnnnnnnnnnnnnnnnnnnnnnnnnnnnnnnnnnnnnnnnnnnnnnnnnnnnnnnnnnnnnnnnnnnnnnnnnnnnnnnnnnnnnnnnnnnnnnnnnnnnnnnnnnnnnnnnnnnnnnnnnnnnnnnnnnnnnnnnnnnnnnnnnnnnnnnnnnnnnnnnnnnnnnnnnnnnnnnnnnnnnnnnnnnnnnnnnnnnnnnnnnnnnnnnnnnnnnnnnnnnnnnnnnnnnnnnnnnnnnnnnnnnnnnnnnnnnnnnnnnnnnnnnnnnnnnnnnnnnnnnnnnnnnnnnnnnnnnnnnnnnnnnnnnnnnnnnnnnnnnnnnnnnnnnnnnnnnnnnnnnnnnnnnnnnnnnnnnnnnnnnnnnnnnnnnnnnnnnnnnnnnnnnnnnnnnnnnnnnnnnnnnnnnnnnnnnnnnnnnnnnnnnnnnnnnnnnnnnnnnnnnnnnnnnnnnnnnnnnnnnnnnnnnnnnnnnnnnnnnnnnnnnnnnnnnnnnnnnnnnnnnnnnnnnnnnnnnnnnnnnnnnnnnnnnnnnnnnnnnnnnnnnnnnnnnnnnnnnnnnnnnnnnnnnnnnnnnnnnnnnnnnnnnnnnnnnnnnnnnnnnnnnnnnnnnnnnnnnnnnnnnnnnnnnnnnnnnnnnnnnnnnnnnnnnnnnnnnnnnnnnnnnnnnnnnnnnnnnnnnnnnnnnnnnnnnnnnnnnnnnnnnnnnnnnnnnnnnnnnnnnnnnnnnnnnnnnnnnnnnnnnnnnnnnnnnnnnnnnnnnnnnnnnnnnnnnnnnnnnnnnnnnnnnnnnnnnnnnnnnnnnnnnnnnnnnnnnnnnnnnnnnnnnnnnnnnnnnnnnnnnnnnnnnnnnnnnnnnnnnnnnnnnnnnnnnnnnnnnnnnnnnnnnnnnnnnnnnnnnnnnnnnnnnnnnnnnnnnnnnnnnnnnnnnnnnnnnnnnnnnnnnnnnnnnnnnnnnnnnnnnnnnnnnnnnnnnnnnnnnnnnnnnnnnnnnnnnnnnnnnnnnnnnnnnnnnnnnnnnnnnnnnnnnnnnnnnnnnnnnnnnnnnnnnnnnnnnnnnnnnnnnnnnnnnnnnnnnnnnnnnnnnnnnnnnnnnnnnnnnnnnnnnnnnnnnnnnnnnnnnnnnnnnnnnnnnnnnnnnnnnnnnnnnnnnnnnnnnnnnnnnnnnnnnnnnnnnnnnnnnnnnnnnnnnnnnnnnnnnnnnnnnnnnnnnnnnnnnnnnnnnnnnnnnnnnnnnnnnnnnnnnnnnnnnnnnnnnnnnnnnnnnnnnnnnnnnnnnnnnnnnnnnnnnnnnnnnnnnnnnnnnnnnnnnnnnnnnnnnnnnnnnnnnnnnnnnnnnnnnnnnnnnnnnnnnnnnnnnnnnnnnnnnnnnnnnnnnnnnnnnnnnnnnnnnnnnnnnnnnnnnnnnnnnnnnnnnnnnnnnnnnnnnnnnnnnnnnnnnnnnnnnnnnnnnnnnnnnnnnnnnnnnnnnnnnnnnnnnnnnnnnnnnnnnnnnnnnnnnnnnnnnnnnnnnnnnnnnnnnnnnnnnnnnnnnnnnnnnnnnnnnnnnnnnnnnnnnnnnnnnnnnnnnnnnnnnnnnnnnnnnnnnnnnnnnnnnnnnnnnnnnnnnnnnnnnnnnnnnnnnnnnnnnnnnnnnnnnnnnnnnnnnnnnnnnnnnnnnnnnnnnnnnnnnnnnnnnnnnnnnnnnnnnnnnnnnnnnnnnnnnnnnnnnnnnnnnnnnnnnnnnnnnnnnnnnnnnnnnnnnnnnnnnnnnnnnnnnnnnnnnnnnnnnnnnnnnnnnnnnnnnnnnnnnnnnnnnnnnnnnnnnnnnnnnnnnnnnnnnnnnnnnnnnnnnnnnnnnnnnnnnnnnnnnnnnnnnnnnnnnnnnnnnnnnnnnnnnnnnnnnnnnnnnnnnnnnnnnnnnnnnnnnnnnnnnnnnnnnnnnnnnnnnnnnnnnnnnnnnnnnnnnnnnnnnnnnnnnnnnnnnnnnnnnnnnnnnnnnnnnnnnnnnnnnnnnnnnnnnnnnnnnnnnnnnnnnnnnnnnnnnnnnnnnnnnnnnnnnnnnnnnnnnnnnnnnnnnnnnnnnnnnnnnnnnnnnnnnnnnnnnnnnnnnnnnnnnnnnnnnnnnnnnnnnnnnnnnnnnnnnnnnnnnnnnnnnnnnnnnnnnnnnnnnnnnnnnnnnnnnnnnnnnnnnnnnnnnnnnnnnnnnnnnnnnnnnnnnnnnnnnnnnnnnnnnnnnnnnnnnnnnnnnnnnnnnnnnnnnnnnnnnnnnnnnnnnnnnnnnnnnnnnnnnnnnnnnnnnnnnnnnnnnnnnnnnnnnnnnnnnnnnnnnnnnnnnnnnnnnnnnnnnnnnnnnnnnnnnnnnnnnnnnnnnnnnnnnnnnnnnnnnnnnnnnnnnnnnnnnnnnnnnnnnnnnnnnnnnnnnnnnnnnnnnnnnnnnnnnnnnnnnnnnnnnnnnnnnnnnnnnnnnnnnnnnnnnnnnnnnnnnnnnnnnnnnnnnnnnnnnnnnnnnnnnnnnnnnnnnnnnnnnnnnnnnnnnnnnnnnnnnnnnnnnnnnnnnnnnnnnnnnnnnnnnnnnnnnnnnnnnnnnnnnnnnnnnnnnnnnnnnnnnnnnnnnnnnnnnnnnnnnnnnnnnnnnnnnnnnnnnnnnnnnnnnnnnnnnnnnnnnnnnnnnnnnnnnnnnnnnnnnnnnnnnnnnnnnnnnnnnnnnnnnnnnnnnnnnnnnnnnnnnnnnnnnnnnnnnnnnnnnnnnnnnnnnnnnnnnnnnnnnnnnnnnnnnnnnnnnnnnnnnnnnnnnnnnnnnnnnnnnnnnnnnnnnnnnnnnnnnnnnnnnnnnnnnnnnnnnnnnnnnnnnnnnnnnnnnnnnnnnnnnnnnnnnnnnnnnnnnnnnnnnnnnnnnnnnnnnnnnnnnnnnnnnnnnnnnnnnnnnnnnnnnnnnnnnnnnnnnnnnnnnnnnnnnnnnnnnnnnnnnnnnnnnnnnnnnnnnnnnnnnnnnnnnnnnnnnnnnnnnnnnnnnnnnnnnnnnnnnnnnnnnnnnnnnnnnnnnnnnnnnnnnnnnnnnnnnnnnnnnnnnnnnnnnnnnnnnnnnnnnnnnnnnnnnnnnnnnnnnnnnnnnnnnnnnnnnnnnnnnnnnnnnnnnnnnnnnnnnnnnnnnnnnnnnnnnnnnnnnnnnnnnnnnnnnnnnnnnnnnnnnnnnnnnnnnnnnnnnnnnnnnnnnnnnnnnnnnnnnnnnnnnnnnnnnnnnnnnnnnnnnnnnnnnnnnnnnnnnnnnnnnnnnnnnnnnnnnnnnnnnnnnnnnnnnnnnnnnnnnnnnnnnnnnnnnnnnnnnnnnnnnnnnnnnnnnnnnnnnnnnnnnnnnnnnnnnnnnnnnnnnnnnnnnnnnnnnnnnnnnnnnnnnnnnnnnnnnnnnnnnnnnnnnnnnnnnnnnnnnnnnnnnnnnnnnnnnnnnnnnnnnnnnnnnnnnnnnnnnnnnnnnnnnnnnnnnnnnnnnnnnnnnnnnnnnnnnnnnnnnnnnnnnnnnnnnnnnnnnnnnnnnnnnnnnnnnnnnnnnnnnnnnnnnnnnnnnnnnnnnnnnnnnnnnnnnnnnnnnnnnnnnnnnnnnnnnnnnnnnnnnnnnnnnnnnnnnnnnnnnnnnnnnnnnnnnnnnnnnnnnnnnnnnnnnnnnnnnnnnnnnnnnnnnnnnnnnnnnnnnnnnnnnnnnnnnnnnnnnnnnnnnnnnnnnnnnnnnnnnnnnnnnnnnnnnnnnnnnnnnnnnnnnnnnnnnnnnnnnnnnnnnnnnnnnnnnnnnnnnnnnnnnnnnnnnnnnnnnnnnnnnnnnnnnnnnnnnnnnnnnnnnnnnnnnnnnnnnnnnnnnnnnnnnnnnnnnnnnnnnnnnnnnnnnnnnnnnnnnnnnnnnnnnnnnnnnnnnnnnnnnnnnnnnnnnnnnnnnnnnnnnnnnnnnnnnnnnnnnnnnnnnnnnnnnnnnnnnnnnnnnnnnnnnnnnnnnnnnnnnnnnnnnnnnnnnnnnnnnnnnnnnnnnnnnnnnnnnnnnnnnnnnnnnnnnnnnnnnnnnnnnnnnnnnnnnnnnnnnnnnnnnnnnnnnnnnnnnnnnnnnnnnnnnnnnnnnnnnnnnnnnnnnnnnnnnnnnnnnnnnnnnnnnnnnnnnnnnnnnnnnnnnnnnnnnnnnnnnnnnnnnnnnnnnnnnnnnnnnnnnnnnnnnnnnnnnnnnnnnnnnnnnnnnnnnnnnnnnnnnnnnnnnnnnnnnnnnnnnnnnnnnnnnnnnnnnnnnnnnnnnnnnnnnnnnnnnnnnnnnnnnnnnnnnnnnnnnnnnnnnnnnnnnnnnnnnnnnnnnnnnnnnnnnnnnnnnnnnnnnnnnnnnnnnnnnnnnnnnnnnnnnnnnnnnnnnnnnnnnnnnnnnnnnnnnnnnnnnnnnnnnnnnnnnnnnnnnnnnnnnnnnnnnnnnnnnnnnnnnnnnnnnnnnnnnnnnnnnnnnnnnnnnnnnnnnnnnnnnnnnnnnnnnnnnnnnnnnnnnnnnnnnnnnnnnnnnnnnnnnnnnnnnnnnnnnnnnnnnnnnnnnnnnnnnnnnnnnnnnnnnnnnnnnnnnnnnnnnnnnnnnnnnnnnnnnnnnnnnnnnnnnnnnnnnnnnnnnnnnnnnnnnnnnnnnnnnnnnnnnnnnnnnnnnnnnnnnnnnnnnnnnnnnnnnnnnnnnnnnnnnnnnnnnnnnnnnnnnnnnnnnnnnnnnnnnnnnnnnnnnnnnnnnnnnnnnnnnnnnnnnnnnnnnnnnnnnnnnnnnnnnnnnnnnnnnnnnnnnnnnnnnnnnnnnnnnnnnnnnnnnnnnnnnnnnnnnnnnnnnnnnnnnnnnnnnnnnnnnnnnnnnnnnnnnnnnnnnnnnnnnnnnnnnnnnnnnnnnnnnnnnnnnnnnnnnnnnnnnnnnnnnnnnnnnnnnnnnnnnnnnnnnnnnnnnnnnnnnnnnnnnnnnnnnnnnnnnnnnnnnnnnnnnnnnnnnnnnnnnnnnnnnnnnnnnnnnnnnnnnnnnnnnnnnnnnnnnnnnnnnnnnnnnnnnnnnnnnnnnnnnnnnnnnnnnnnnnnnnnnnnnnnnnnnnnnnnnnnnnnnnnnnnnnnnnnnnnnnnnnnnnnnnnnnnnnnnnnnnnnnnnnnnnnnnnnnnnnnnnnnnnnnnnnnnnnnnnnnnnnnnnnnnnnnnnnnnnnnnnnnnnnnnnnnnnnnnnnnnnnnnnnnnnnnnnnnnnnnnnnnnnnnnnnnnnnnnnnnnnnnnnnnnnnnnnnnnnnnnnnnnnnnnnnnnnnnnnnnnnnnnnnnnnnnnnnnnnnnnnnnnnnnnnnnnnnnnnnnnnnnnnnnnnnnnnnnnnnnnnnnnnnnnnnnnnnnnnnnnnnnnnnnnnnnnnnnnnnnnnnnnnnnnnnnnnnnnnnnnnnnnnnnnnnnnnnnnnnnnnnnnnnnnnnnnnnnnnnnnnnnnnnnnnnnnnnnnnnnnnnnnnnnnnnnnnnnnnnnnnnnnnnnnnnnnnnnnnnnnnnnnnnnnnnnnnnnnnnnnnnnnnnnnnnnnnnnnnnnnnnnnnnnnnnnnnnnnnnnnnnnnnnnnnnnnnnnnnnnnnnnnnnnnnnnnnnnnnnnnnnnnnnnnnnnnnnnnnnnnnnnnnnnnnnnnnnnnnnnnnnnnnnnnnnnnnnnnnnnnnnnnnnnnnnnnnnnnnnnnnnnnnnnnnnnnnnnnnnnnnnnnnnnnnnnnnnnnnnnnnnnnnnnnnnnnnnnnnnnnnnnnnnnnnnnnnnnnnnnnnnnnnnnnnnnnnnnnnnnnnnnnnnnnnnnnnnnnnnnnnnnnnnnnnnnnnnnnnnnnnnnnnnnnnnnnnnnnnnnnnnnnnnnnnnnnnnnnnnnnnnnnnnnnnnnnnnnnnnnnnnnnnnnnnnnnnnnnnnnnnnnnnnnnnnnnnnnnnnnnnnnnnnnnnnnnnnnnnnnnnnnnnnnnnnnnnnnnnnnnnnnnnnnnnnnnnnnnnnnnnnnnnnnnnnnnnnnnnnnnnnnnnnnnnnnnnnnnnnnnnnnnnnnnnnnnnnnnnnnnnnnnnnnnnnnnnnnnnnnnnnnnnnnnnnnnnnnnnnnnnnnnnnnnnnnnnnnnnnnnnnnnnnnnnnnnnnnnnnnnnnnnnnnnnnnnnnnnnnnnnnnnnnnnnnnnnnnnnnnnnnnnnnnnnnnnnnnnnnnnnnnnnnnnnnnnnnnnnnnnnnnnnnnnnnnnnnnnnnnnnnnnnnnnnnnnnnnnnnnnnnnnnnnnnnnnnnnnnnnnnnnnnnnnnnnnnnnnnnnnnnnnnnnnnnnnnnnnnnnnnnnnnnnnnnnnnnnnnnnnnnnnnnnnnnnnnnnnnnnnnnnnnnnnnnnnnnnnnnnnnnnnnnnnnnnnnnnnnnnnnnnnnnnnnnnnnnnnnnnnnnnnnnnnnnnnnnnnnnnnnnnnnnnnnnnnnnnnnnnnnnnnnnnnnnnnnnnnnnnnnnnnnnnnnnnnnnnnnnnnnnnnnnnnnnnnnnnnnnnnnnnnnnnnnnnnnnnnnnnnnnnnnnnnnnnnnnnnnnnnnnnnnnnnnnnnnnnnnnnnnnnnnnnnnnnnnnnnnnnnnnnnnnnnnnnnnnnnnnnnnnnnnnnnnnnnnnnnnnnnnnnnnnnnnnnnnnnnnnnnnnnnnnnnnnnnnnnnnnnnnnnnnnnnnnnnnnnnnnnnnnnnnnnnnnnnnnnnnnnnnnnnnnnnnnnnnnnnnnnnnnnnnnnnnnnnnnnnnnnnnnnnnnnnnnnnnnnnnnnnnnnnnnnnnnnnnnnnnnnnnnnnnnnnnnnnnnnnnnnnnnnnnnnnnnnnnnnnnnnnnnnnnnnnnnnnnnnnnnnnnnnnnnnnnnnnnnnnnnnnnnnnnnnnnnnnnnnnnnnnnnnnnnnnnnnnnnnnnnnnnnnnnnnnnnnnnnnnnnnnnnnnnnnnnnnnnnnnnnnnnnnnnnnnnnnnnnnnnnnnnnnnnnnnnnnnnnnnnnnnnnnnnnnnnnnnnnnnnnnnnnnnnnnnnnnnnnnnnnnnnnnnnnnnnnnnnnnnnnnnnnnnnnnnnnnnnnnnnnnnnnnnnnnnnnnnnnnnnnnnnnnnnnnnnnnnnnnnnnnnnnnnnnnnnnnnnnnnnnnnnnnnnnnnnnnnnnnnnnnnnnnnnnnnnnnnnnnnnnnnnnnnnnnnnnnnnnnnnnnnnnnnnnnnnnnnnnnnnnnnnnnnnnnnnnnnnnnnnnnnnnnnnnnnnnnnnnnnnnnnnnnnnnnnnnnnnnnnnnnnnnnnnnnnnnnnnnnnnnnnnnnnnnnnnnnnnnnnnnnnnnnnnnnnnnnnnnnnnnnnnnnnnnnnnnnnnnnnnnnnnnnnnnnnnnnnnnnnnnnnnnnnnnnnnnnnnnnnnnnnnnnnnnnnnnnnnnnnnnnnnnnnnnnnnnnnnnnnnnnnnnnnnnnnnnnnnnnnnnnnnnnnnnnnnnnnnnnnnnnnnnnnnnnnnnnnnnnnnnnnnnnnnnnnnnnnnnnnnnnnnnnnnnnnnnnnnnnnnnnnnnnnnnnnnnnnnnnnnnnnnnnnnnnnnnnnnnnnnnnnnnnnnnnnnnnnnnnnnnnnnnnnnnnnnnnnnnnnnnnnnnnnnnnnnnnnnnnnnnnnnnnnnnnnnnnnnnnnnnnnnnnnnnnnnnnnnnnnnnnnnnnnnnnnnnnnnnnnnnnnnnnnnnnnnnnnnnnnnnnnnnnnnnnnnnnnnnnnnnnnnnnnnnnnnnnnnnnnnnnnnnnnnnnnnnnnnnnnnnnnnnnnnnnnnnnnnnnnnnnnnnnnnnnnnnnnnnnnnnnnnnnnnnnnnnnnnnnnnnnnnnnnnnnnnnnnnnnnnnnnnnnnnnnnnnnnnnnnnnnnnnnnnnnnnnnnnnnnnnnnnnnnnnnnnnnnnnnnnnnnnnnnnnnnnnnnnnnnnnnnnnnnnnnnnnnnnnnnnnnnnnnnnnnnnnnnnnnnnnnnnnnnnnnnnnnnnnnnnnnnnnnnnnnnnnnnnnnnnnnnnnnnnnnnnnnnnnnnnnnnnnnnnnnnnnnnnnnnnnnnnnnnnnnnnnnnnnnnnnnnnnnnnnnnnnnnnnnnnnnnnnnnnnnnnnnnnnnnnnnnnnnnnnnnnnnnnnnnnnnnnnnnnnnnnnnnnnnnnnnnnnnnnnnnnnnnnnnnnnnnnnnnnnnnnnnnnnnnnnnnnnnnnnnnnnnnnnnnnnnnnnnnnnnnnnnnnnnnnnnnnnnnnnnnnnnnnnnnnnnnnnnnnnnnnnnnnnnnnnnnnnnnnnnnnnnnnnnnnnnnnnnnnnnnnnnnnnnnnnnnnnnnnnnnnnnnnnnnnnnnnnnnnnnnnnnnnnnnnnnnnnnnnnnnnnnnnnnnnnnnnnnnnnnnnnnnnnnnnnnnnnnnnnnnnnnnnnnnnnnnnnnnnnnnnnnnnnnnnnnnnnnnnnnnnnnnnnnnnnnnnnnnnnnnnnnnnnnnnnnnnnnnnnnnnnnnnnnnnnnnnnnnnnnnnnnnnnnnnnnnnnnnnnnnnnnnnnnnnnnnnnnnnnnnnnnnnnnnnnnnnnnnnnnnnnnnnnnnnnnnnnnnnnnnnnnnnnnnnnnnnnnnnnnnnnnnnnnnnnnnnnnnnnnnnnnnnnnnnnnnnnnnnnnnnnnnnnnnnnnnnnnnnnnnnnnnnnnnnnnnnnnnnnnnnnnnnnnnnnnnnnnnnnnnnnnnnnnnnnnnnnnnnnnnnnnnnnnnnnnnnnnnnnnnnnnnnnnnnnnnnnnnnnnnnnnnnnnnnnnnnnnnnnnnnnnnnnnnnnnnnnnnnnnnnnnnnnnnnnnnnnnnnnnnnnnnnnnnnnnnnnnnnnnnnnnnnnnnnnnnnnnnnnnnnnnnnnnnnnnnnnnnnnnnnnnnnnnnnnnnnnnnnnnnnnnnnnnnnnnnnnnnnnnnnnnnnnnnnnnnnnnnnnnnnnnnnnnnnnnnnnnnnnnnnnnnnnnnnnnnnnnnnnnnnnnnnnnnnnnnnnnnnnnnnnnnnnnnnnnnnnnnnnnnnnnnnnnnnnnnnnnnnnnnnnnnnnnnnnnnnnnnnnnnnnnnnnnnnnnnnnnnnnnnnnnnnnnnnnnnnnnnnnnnnnnnnnnnnnnnnnnnnnnnnnnnnnnnnnnnnnnnnnnnnnnnnnnnnnnnnnnnnnnnnnnnnnnnnnnnnnnnnnnnnnnnnnnnnnnnnnnnnnnnnnnnnnnnnnnnnnnnnnnnnnnnnnnnnnnnnnnnnnnnnnnnnnnnnnnnnnnnnnnnnnnnnnnnnnnnnnnnnnnnnnnnnnnnnnnnnnnnnnnnnnnnnnnnnnnnnnnnnnnnnnnnnnnnnnnnnnnnnnnnnnnnnnnnnnnnnnnnnnnnnnnnnnnnnnnnnnnnnnnnnnnnnnnnnnnnnnnnnnnnnnnnnnnnnnnnnnnnnnnnnnnnnnnnnnnnnnnnnnnnnnnnnnnnnnnnnnnnnnnnnnnnnnnnnnnnnnnnnnnnnnnnnnnnnnnnnnnnnnnnnnnnnnnnnnnnnnnnnnnnnnnnnnnnnnnnnnnnnnnnnnnnnnnnnnnnnnnnnnnnnnnnnnnnnnnnnnnnnnnnnnnnnnnnnnnnnnnnnnnnnnnnnnnnnnnnnnnnnnnnnnnnnnnnnnnnnnnnnnnnnnnnnnnnnnnnnnnnnnnnnnnnnnnnnnnnnnnnnnnnnnnnnnnnnnnnnnnnnnnnnnnnnnnnnnnnnnnnnnnnnnnnnnnnnnnnnnnnnnnnnnnnnnnnnnnnnnnnnnnnnnnnnnnnnnnnnnnnnnnnnnnnnnnnnnnnnnnnnnnnnnnnnnnnnnnnnnnnnnnnnnnnnnnnnnnnnnnnnnnnnnnnnnnnnnnnnnnnnnnnnnnnnnnnnnnnnnnnnnnnnnnnnnnnnnnnnnnnnnnnnnnnnnnnnnnnnnnnnnnnnnnnnnnnnnnnnnnnnnnnnnnnnnnnnnnnnnnnnnnnnnnnnnnnnnnnnnnnnnnnnnnnnnnnnnnnnnnnnnnnnnnnnnnnnnnnnnnnnnnnnnnnnnnnnnnnnnnnnnnnnnnnnnnnnnnnnnnnnnnnnnnnnnnnnnnnnnnnnnnnnnnnnnnnnnnnnnnnnnnnnnnnnnnnnnnnnnnnnnnnnnnnnnnnnnnnnnnnnnnnnnnnnnnnnnnnnnnnnnnnnnnnnnnnnnnnnnnnnnnnnnnnnnnnnnnnnnnnnnnnnnnnnnnnnnnnnnnnnnnnnnnnnnnnnnnnnnnnnnnnnnnnnnnnnnnnnnnnnnnnnnnnnnnnnnnnnnnnnnnnnnnnnnnnnnnnnnnnnnnnnnnnnnnnnnnnnnnnnnnnnnnnnnnnnnnnnnnnnnnnnnnnnnnnnnnnnnnnnnnnnnnnnnnnnnnnnnnnnnnnnnnnnnnnnnnnnnnnnnnnnnnnnnnnnnnnnnnnnnnnnnnnnnnnnnnnnnnnnnnnnnnnnnnnnnnnnnnnnnnnnnnnnnnnnnnnnnnnnnnnnnnnnnnnnnnnnnnnnnnnnnnnnnnnnnnnnnnnnnnnnnnnnnnnnnnnnnnnnnnnnnnnnnnnnnnnnnnnnnnnnnnnnnnnnnnnnnnnnnnnnnnnnnnnnnnnnnnnnnnnnnnnnnnnnnnnnnnnnnnnnnnnnnnnnnnnnnnnnnnnnnnnnnnnnnnnnnnnnnnnnnnnnnnnnnnnnnnnnnnnnnnnnnnnnnnnnnnnnnnnnnnnnnnnnnnnnnnnnnnnnnnnnnnnnnnnnnnnnnnnnnnnnnnnnnnnnnnnnnnnnnnnnnnnnnnnnnnnnnnnnnnnnnnnnnnnnnnnnnnnnnnnnnnnnnnnnnnnnnnnnnnnnnnnnnnnnnnnnnnnnnnnnnnnnnnnnnnnnnnnnnnnnnnnnnnnnnnnnnnnnnnnnnnnnnnnnnnnnnnnnnnnnnnnnnnnnnnnnnnnnnnnnnnnnnnnnnnnnnnnnnnnnnnnnnnnnnnnnnnnnnnnnnnnnnnnnnnnnnnnnnnnnnnnnnnnnnnnnnnnnnnnnnnnnnnnnnnnnnnnnnnnnnnnnnnnnnnnnnnnnnnnnnnnnnnnnnnnnnnnnnnnnnnnnnnnnnnnnnnnnnnnnnnnnnnnnnnnnnnnnnnnnnnnnnnnnnnnnnnnnnnnnnnnnnnnnnnnnnnnnnnnnnnnnnnnnnnnnnnnnnnnnnnnnnnnnnnnnnnnnnnnnnnnnnnnnnnnnnnnnnnnnnnnnnnnnnnnnnnnnnnnnnnnnnnnnnnnnnnnnnnnnnnnnnnnnnnnnnnnnnnnnnnnnnnnnnnnnnnnnnnnnnnnnnnnnnnnnnnnnnnnnnnnnnnnnnnnnnnnnnnnnnnnnnnnnnnnnnnnnnnnnnnnnnnnnnnnnnnnnnnnnnnnnnnnnnnnnnnnnnnnnnnnnnnnnnnnnnnnnnnnnnnnnnnnnnnnnnnnnnnnnnnnnnnnnnnnnnnnnnnnnnnnnnnnnnnnnnnnnnnnnnnnnnnnnnnnnnnnnnnnnnnnnnnnnnnnnnnnnnnnnnnnnnnnnnnnnnnnnnnnnnnnnnnnnnnnnnnnnnnnnnnnnnnnnnnnnnnnnnnnnnnnnnnnnnnnnnnnnnnnnnnnnnnnnnnnnnnnnnnnnnnnnnnnnnnnnnnnnnnnnnnnnnnnnnnnnnnnnnnnnnnnnnnnnnnnnnnnnnnnnnnnnnnnnnnnnnnnnnnnnnnnnnnnnnnnnnnnnnnnnnnnnnnnnnnnnnnnnnnnnnnnnnnnnnnnnnnnnnnnnnnnnnnnnnnnnnnnnnnnnnnnnnnnnnnnnnnnnnnnnnnnnnnnnnnnnnnnnnnnnnnnnnnnnnnnnnnnnnnnnnnnnnnnnnnnnnnnnnnnnnnnnnnnnnnnnnnnnnnnnnnnnnnnnnnnnnnnnnnnnnnnnnnnnnnnnnnnnnnnnnnnnnnnnnnnnnnnnnnnnnnnnnnnnnnnnnnnnnnnnnnnnnnnnnnnnnnnnnnnnnnnnnnnnnnnnnnnnnnnnnnnnnnnnnnnnnnnnnnnnnnnnnnnnnnnnnnnnnnnnnnnnnnnnnnnnnnnnnnnnnnnnnnnnnnnnnnnnnnnnnnnnnnnnnnnnnnnnnnnnnnnnnnnnnnnnnnnnnnnnnnnnnnnnnnnnnnnnnnnnnnnnnnnnnnnnnnnnnnnnnnnnnnnnnnnnnnnnnnnnnnnnnnnnnnnnnnnnnnnnnnnnnnnnnnnnnnnnnnnnnnnnnnnnnnnnnnnnnnnnnnnnnnnnnnnnnnnnnnnnnnnnnnnnnnnnnnnnnnnnnnnnnnnnnnnnnnnnnnnnnnnnnnnnnnnnnnnnnnnnnnnnnnnnnnnnnnnnnnnnnnnnnnnnnnnnnnnnnnnnnnnnnnnnnnnnnnnnnnnnnnnnnnnnnnnnnnnnnnnnnnnnnnnnnnnnnnnnnnnnnnnnnnnnnnnnnnnnnnnnnnnnnnnnnnnnnnnnnnnnnnnnnnnnnnnnnnnnnnnnnnnnnnnnnnnnnnnnnnnnnnnnnnnnnnnnnnnnnnnnnnnnnnnnnnnnnnnnnnnnnnnnnnnnnnnnnnnnnnnnnnnnnnnnnnnnnnnnnnnnnnnnnnnnnnnnnnnnnnnnnnnnnnnnnnnnnnnnnnnnnnnnnnnnnnnnnnnnnnnnnnnnnnnnnnnnnnnnnnnnnnnnnnnnnnnnnnnnnnnnnnnnnnnnnnnnnnnnnnnnnnnnnnnnnnnnnnnnnnnnnnnnnnnnnnnnnnnnnnnnnnnnnnnnnnnnnnnnnnnnnnnnnnnnnnnnnnnnnnnnnnnnnnnnnnnnnnnnnnnnnnnnnnnnnnnnnnnnnnnnnnnnnnnnnnnnnnnnnnnnnnnnnnnnnnnnnnnnnnnnnnnnnnnnnnnnnnnnnnnnnnnnnnnnnnnnnnnnnnnnnnnnnnnnnnnnnnnnnnnnnnnnnnnnnnnnnnnnnnnnnnnnnnnnnnnnnnnnnnnnnnnnnnnnnnnnnnnnnnnnnnnnnnnnnnnnnnnnnnnnnnnnnnnnnnnnnnnnnnnnnnnnnnnnnnnnnnnnnnnnnnnnnnnnnnnnnnnnnnnnnnnnnnnnnnnnnnnnnnnnnnnnnnnnnnnnnnnnnnnnnnnnnnnnnnnnnnnnnnnnnnnnnnnnnnnnnnnnnnnnnnnnnnnnnnnnnnnnnnnnnnnnnnnnnnnnnnnnnnnnnnnnnnnnnnnnnnnnnnnnnnnnnnnnnnnnnnnnnnnnnnnnnnnnnnnnnnnnnnnnnnnnnnnnnnnnnnnnnnnnnnnnnnnnnnnnnnnnnnnnnnnnnnnnnnnnnnnnnnnnnnnnnnnnnnnnnnnnnnnnnnnnnnnnnnnnnnnnnnnnnnnnnnnnnnnnnnnnnnnnnnnnnnnnnnnnnnnnnnnnnnnnnnnnnnnnnnnnnnnnnnnnnnnnnnnnnnnnnnnnnnnnnnnnnnnnnnnnnnnnnnnnnnnnnnnnnnnnnnnnnnnnnnnnnnnnnnnnnnnnnnnnnnnnnnnnnnnnnnnnnnnnnnnnnnnnnnnnnnnnnnnnnnnnnnnnnnnnnnnnnnnnnnnnnnnnnnnnnnnnnnnnnnnnnnnnnnnnnnnnnnnnnnnnnnnnnnnnnnnnnnnnnnnnnnnnnnnnnnnnnnnnnnnnnnnnnnnnnnnnnnnnnnnnnnnnnnnnnnnnnnnnnnnnnnnnnnnnnnnnnnnnnnnnnnnnnnnnnnnnnnnnnnnnnnnnnnnnnnnnnnnnnnnnnnnnnnnnnnnnnnnnnnnnnnnnnnnnnnnnnnnnnnnnnnnnnnnnnnnnnnnnnnnnnnnnnnnnnnnnnnnnnnnnnnnnnnnnnnnnnnnnnnnnnnnnnnnnnnnnnnnnnnnnnnnnnnnnnnnnnnnnnnnnnnnnnnnnnnnnnnnnnnnnnnnnnnnnnnnnnnnnnnnnnnnnnnnnnnnnnnnnnnnnnnnnnnnnnnnnnnnnnnnnnnnnnnnnnnnnnnnnnnnnnnnnnnnnnnnnnnnnnnnnnnnnnnnnnnnnnnnnnnnnnnnnnnnnnnnnnnnnnnnnnnnnnnnnnnnnnnnnnnnnnnnnnnnnnnnnnnnnnnnnnnnnnnnnnnnnnnnnnnnnnnnnnnnnnnnnnnnnnnnnnnnnnnnnnnnnnnnnnnnnnnnnnnnnnnnnnnnnnnnnnnnnnnnnnnnnnnnnnnnnnnnnnnnnnnnnnnnnnnnnnnnnnnnnnnnnnnnnnnnnnnnnnnnnnnnnnnnnnnnnnnnnnnnnnnnnnnnnnnnnnnnnnnnnnnnnnnnnnnnnnnnnnnnnnnnnnnnnnnnnnnnnnnnnnnnnnnnnnnnnnnnnnnnnnnnnnnnnnnnnnnnnnnnnnnnnnnnnnnnnnnnnnnnnnnnnnnnnnnnnnnnnnnnnnnnnnnnnnnnnnnnnnnnnnnnnnnnnnnnnnnnnnnnnnnnnnnnnnnnnnnnnnnnnnnnnnnnnnnnnnnnnnnnnnnnnnnnnnnnnnnnnnnnnnnnnnnnnnnnnnnnnnnnnnnnnnnnnnnnnnnnnnnnnnnnnnnnnnnnnnnnnnnnnnnnnnnnnnnnnnnnnnnnnnnnnnnnnnnnnnnnnnnnnnnnnnnnnnnnnnnnnnnnnnnnnnnnnnnnnnnnnnnnnnnnnnnnnnnnnnnnnnnnnnnnnnnnnnnnnnnnnnnnnnnnnnnnnnnnnnnnnnnnnnnnnnnnnnnnnnnnnnnnnnnnnnnnnnnnnnnnnnnnnnnnnnnnnnnnnnnnnnnnnnnnnnnnnnnnnnnnnnnnnnnnnnnnnnnnnnnnnnnnnnnnnnnnnnnnnnnnnnnnnnnnnnnnnnnnnnnnnnnnnnnnnnnnnnnnnnnnnnnnnnnnnnnnnnnnnnnnnnnnnnnnnnnnnnnnnnnnnnnnnnnnnnnnnnnnnnnnnnnnnnnnnnnnnnnnnnnnnnnnnnnnnnnnnnnnnnnnnnnnnnnnnnnnnnnnnnnnnnnnnnnnnnnnnnnnnnnnnnnnnnnnnnnnnnnnnnnnnnnnnnnnnnnnnnnnnnnnnnnnnnnnnnnnnnnnnnnnnnnnnnnnnnnnnnnnnnnnnnnnnnnnnnnnnnnnnnnnnnnnnnnnnnnnnnnnnnnnnnnnnnnnnnnnnnnnnnnnnnnnnnnnnnnnnnnnnnnnnnnnnnnnnnnnnnnnnnnnnnnnnnnnnnnnnnnnnnnnnnnnnnnnnnnnnnnnnnnnnnnnnnnnnnnnnnnnnnnnnnnnnnnnnnnnnnnnnnnnnnnnnnnnnnnnnnnnnnnnnnnnnnnnnnnnnnnnnnnnnnnnnnnnnnnnnnnnnnnnnnnnnnnnnnnnnnnnnnnnnnnnnnnnnnnnnnnnnnnnnnnnnnnnnnnnnnnnnnnnnnnnnnnnnnnnnnnnnnnnnnnnnnnnnnnnnnnnnnnnnnnnnnnnnnnnnnnnnnnnnnnnnnnnnnnnnnnnnnnnnnnnnnnnnnnnnnnnnnnnnnnnnnnnnnnnnnnnnnnnnnnnnnnnnnnnnnnnnnnnnnnnnnnnnnnnnnnnnnnnnnnnnnnnnnnnnnnnnnnnnnnnnnnnnnnnnnnnnnnnnnnnnnnnnnnnnnnnnnnnnnnnnnnnnnnnnnnnnnnnnnnnnnnnnnnnnnnnnnnnnnnnnnnnnnnnnnnnnnnnnnnnnnnnnnnnnnnnnnnnnnnnnnnnnnnnnnnnnnnnnnnnnnnnnnnnnnnnnnnnnnnnnnnnnnnnnnnnnnnnnnnnnnnnnnnnnnnnnnnnnnnnnnnnnnnnnnnnnnnnnnnnnnnnnnnnnnnnnnnnnnnnnnnnnnnnnnnnnnnnnnnnnnnnnnnnnnnnnnnnnnnnnnnnnnnnnnnnnnnnnnnnnnnnnnnnnnnnnnnnnnnnnnnnnnnnnnnnnnnnnnnnnnnnnnnnnnnnnnnnnnnnnnnnnnnnnnnnnnnnnnnnnnnnnnnnnnnnnnnnnnnnnnnnnnnnnnnnnnnnnnnnnnnnnnnnnnnnnnnnnnnnnnnnnnnnnnnnnnnnnnnnnnnnnnnnnnnnnnnnnnnnnnnnnnnnnnnnnnnnnnnnnnnnnnnnnnnnnnnnnnnnnnnnnnnnnnnnnnnnnnnnnnnnnnnnnnnnnnnnnnnnnnnnnnnnnnnnnnnnnnnnnnnnnnnnnnnnnnnnnnnnnnnnnnnnnnnnnnnnnnnnnnnnnnnnnnnnnnnnnnnnnnnnnnnnnnnnnnnnnnnnnnnnnnnnnnnnnnnnnnnnnnnnnnnnnnnnnnnnnnnnnnnnnnnnnnnnnnnnnnnnnnnnnnnnnnnnnnnnnnnnnnnnnnnnnnnnnnnnnnnnnnnnnnnnnnnnnnnnnnnnnnnnnnnnnnnnnnnnnnnnnnnnnnnnnnnnnnnnnnnnnnnnnnnnnnnnnnnnnnnnnnnnnnnnnnnnnnnnnnnnnnnnnnnnnnnnnnnnnnnnnnnnnnnnnnnnnnnnnnnnnnnnnnnnnnnnnnnnnnnnnnnnnnnnnnnnnnnnnnnnnnnnnnnnnnnnnnnnnnnnnnnnnnnnnnnnnnnnnnnnnnnnnnnnnnnnnnnnnnnnnnnnnnnnnnnnnnnnnnnnnnnnnnnnnnnnnnnnnnnnnnnnnnnnnnnnnnnnnnnnnnnnnnnnnnnnnnnnnnnnnnnnnnnnnnnnnnnnnnnnnnnnnnnnnnnnnnnnnnnnnnnnnnnnnnnnnnnnnnnnnnnnnnnnnnnnnnnnnnnnnnnnnnnnnnnnnnnnnnnnnnnnnnnnnnnnnnnnnnnnnnnnnnnnnnnnnnnnnnnnnnnnnnnnnnnnnnnnnnnnnnnnnnnnnnnnnnnnnnnnnnnnnnnnnnnnnnnnnnnnnnnnnnnnnnnnnnnnnnnnnnnnnnnnnnnnnnnnnnnnnnnnnnnnnnnnnnnnnnnnnnnnnnnnnnnnnnnnnnnnnnnnnnnnnnnnnnnnnnnnnnnnnnnnnnnnnnnnnnnnnnnnnnnnnnnnnnnnnnnnnnnnnnnnnnnnnnnnnnnnnnnnnnnnnnnnnnnnnnnnnnnnnnnnnnnnnnnnnnnnnnnnnnnnnnnnnnnnnnnnnnnnnnnnnnnnnnnnnnnnnnnnnnnnnnnnnnnnnnnnnnnnnnnnnnnnnnnnnnnnnnnnnnnnnnnnnnnnnnnnnnnnnnnnnnnnnnnnnnnnnnnnnnnnnnnnnnnnnnnnnnnnnnnnnnnnnnnnnnnnnnnnnnnnnnnnnnnnnnnnnnnnnnnnnnnnnnnnnnnnnnnnnnnnnnnnnnnnnnnnnnnnnnnnnnnnnnnnnnnnnnnnnnnnnnnnnnnnnnnnnnnnnnnnnnnnnnnnnnnnnnnnnnnnnnnnnnnnnnnnnnnnnnnnnnnnnnnnnnnnnnnnnnnnnnnnnnnnnnnnnnnnnnnnnnnnnnnnnnnnnnnnnnnnnnnnnnnnnnnnnnnnnnnnnnnnnnnnnnnnnnnnnnnnnnnnnnnnnnnnnnnnnnnnnnnnnnnnnnnnnnnnnnnnnnnnnnnnnnnnnnnnnnnnnnnnnnnnnnnnnnnnnnnnnnnnnnnnnnnnnnnnnnnnnnnnnnnnnnnnnnnnnnnnnnnnnnnnnnnnnnnnnnnnnnnnnnnnnnnnnnnnnnnnnnnnnnnnnnnnnnnnnnnnnnnnnnnnnnnnnnnnnnnnnnnnnnnnnnnnnnnnnnnnnnnnnnnnnnnnnnnnnnnnnnnnnnnnnnnnnnnnnnnnnnnnnnnnnnnnnnnnnnnnnnnnnnnnnnnnnnnnnnnnnnnnnnnnnnnnnnnnnnnnnnnnnnnnnnnnnnnnnnnnnnnnnnnnnnnnnnnnnnnnnnnnnnnnnnnnnnnnnnnnnnnnnnnnnnnnnnnnnnnnnnnnnnnnnnnnnnnnnnnnnnnnnnnnnnnnnnnnnnnnnnnnnnnnnnnnnnnnnnnnnnnnnnnnnnnnnnnnnnnnnnnnnnnnnnnnnnnnnnnnnnnnnnnnnnnnnnnnnnnnnnnnnnnnnnnnnnnnnnnnnnnnnnnnnnnnnnnnnnnnnnnnnnnnnnnnnnnnnnnnnnnnnnnnnnnnnnnnnnnnnnnnnnnnnnnnnnnnnnnnnnnnnnnnnnnnnnnnnnnnnnnnnnnnnnnnnnnnnnnnnnnnnnnnnnnnnnnnnnnnnnnnnnnnnnnnnnnnnnnnnnnnnnnnnnnnnnnnnnnnnnnnnnnnnnnnnnnnnnnnnnnnnnnnnnnnnnnnnnnnnnnnnnnnnnnnnnnnnnnnnnnnnnnnnnnnnnnnnnnnnnnnnnnnnnnnnnnnnnnnnnnnnnnnnnnnnnnnnnnnnnnnnnnnnnnnnnnnnnnnnnnnnnnnnnnnnnnnnnnnnnnnnnnnnnnnnnnnnnnnnnnnnnnnnnnnnnnnnnnnnnnnnnnnnnnnnnnnnnnnnnnnnnnnnnnnnnnnnnnnnnnnnnnnnnnnnnnnnnnnnnnnnnnnnnnnnnnnnnnnnnnnnnnnnnnnnnnnnnnnnnnnnnnnnnnnnnnnnnnnnnnnnnnnnnnnnnnnnnnnnnnnnnnnnnnnnnnnnnnnnnnnnnnnnnnnnnnnnnnnnnnnnnnnnnnnnnnnnnnnnnnnnnnnnnnnnnnnnnnnnnnnnnnnnnnnnnnnnnnnnnnnnnnnnnnnnnnnnnnnnnnnnnnnnnnnnnnnnnnnnnnnnnnnnnnnnnnnnnnnnnnnnnnnnnnnnnnnnnnnnnnnnnnnnnnnnnnnnnnnnnnnnnnnnnnnnnnnnnnnnnnnnnnnnnnnnnnnnnnnnnnnnnnnnnnnnnnnnnnnnnnnnnnnnnnnnnnnnnnnnnnnnnnnnnnnnnnnnnnnnnnnnnnnnnnnnnnnnnnnnnnnnnnnnnnnnnnnnnnnnnnnnnnnnnnnnnnnnnnnnnnnnnnnnnnnnnnnnnnnnnnnnnnnnnnnnnnnnnnnnnnnnnnnnnnnnnnnnnnnnnnnnnnnnnnnnnnnnnnnnnnnnnnnnnnnnnnnnnnnnnnnnnnnnnnnnnnnnnnnnnnnnnnnnnnnnnnnnnnnnnnnnnnnnnnnnnnnnnnnnnnnnnnnnnnnnnnnnnnnnnnnnnnnnnnnnnnnnnnnnnnnnnnnnnnnnnnnnnnnnnnnnnnnnnnnnnnnnnnnnnnnnnnnnnnnnnnnnnnnnnnnnnnnnnnnnnnnnnnnnnnnnnnnnnnnnnnnnnnnnnnnnnnnnnnnnnnnnnnnnnnnnnnnnnnnnnnnnnnnnnnnnnnnnnnnnnnnnnnnnnnnnnnnnnnnnnnnnnnnnnnnnnnnnnnnnnnnnnnnnnnnnnnnnnnnnnnnnnnnnnnnnnnnnnnnnnnnnnnnnnnnnnnnnnnnnnnnnnnnnnnnnnnnnnnnnnnnnnnnnnnnnnnnnnnnnnnnnnnnnnnnnnnnnnnnnnnnnnnnnnnnnnnnnnnnnnnnnnnnnnnnnnnnnnnnnnnnnnnnnnnnnnnnnnnnnnnnnnnnnnnnnnnnnnnnnnnnnnnnnnnnnnnnnnnnnnnnnnnnnnnnnnnnnnnnnnnnnnnnnnnnnnnnnnnnnnnnnnnnnnnnnnnnnnnnnnnnnnnnnnnnnnnnnnnnnnnnnnnnnnnnnnnnnnnnnnnnnnnnnnnnnnnnnnnnnnnnnnnnnnnnnnnnnnnnnnnnnnnnnnnnnnnnnnnnnnnnnnnnnnnnnnnnnnnnnnnnnnnnnnnnnnnnnnnnnnnnnnnnnnnnnnnnnnnnnnnnnnnnnnnnnnnnnnnnnnnnnnnnnnnnnnnnnnnnnnnnnnnnnnnnnnnnnnnnnnnnnnnnnnnnnnnnnnnnnnnnnnnnnnnnnnnnnnnnnnnnnnnnnnnnnnnnnnnnnnnnnnnnnnnnnnnnnnnnnnnnnnnnnnnnnnnnnnnnnnnnnnnnnnnnnnnnnnnnnnnnnnnnnnnnnnnnnnnnnnnnnnnnnnnnnnnnnnnnnnnnnnnnnnnnnnnnnnnnnnnnnnnnnnnnnnnnnnnnnnnnnnnnnnnnnnnnnnnnnnnnnnnnnnnnnnnnnnnnnnnnnnnnnnnnnnnnnnnnnnnnnnnnnnnnnnnnnnnnnnnnnnnnnnnnnnnnnnnnnnnnnnnnnnnnnnnnnnnnnnnnnnnnnnnnnnnnnnnnnnnnnnnnnnnnnnnnnnnnnnnnnnnnnnnnnnnnnnnnnnnnnnnnnnnnnnnnnnnnnnnnnnnnnnnnnnnnnnnnnnnnnnnnnnnnnnnnnnnnnnnnnnnnnnnnnnnnnnnnnnnnnnnnnnnnnnnnnnnnnnnnnnnnnnnnnnnnnnnnnnnnnnnnnnnnnnnnnnnnnnnnnnnnnnnnnnnnnnnnnnnnnnnnnnnnnnnnnnnnnnnnnnnnnnnnnnnnnnnnnnnnnnnnnnnnnnnnnnnnnnnnnnnnnnnnnnnnnnnnnnnnnnnnnnnnnnnnnnnnnnnnnnnnnnnnnnnnnnnnnnnnnnnnnnnnnnnnnnnnnnnnnnnnnnnnnnnnnnnnnnnnnnnnnnnnnnnnnnnnnnnnnnnnnnnnnnnnnnnnnnnnnnnnnnnnnnnnnnnnnnnnnnnnnnnnnnnnnnnnnnnnnnnnnnnnnnnnnnnnnnnnnnnnnnnnnnnnnnnnnnnnnnnnnnnnnnnnnnnnnnnnnnnnnnnnnnnnnnnnnnnnnnnnnnnnnnnnnnnnnnnnnnnnnnnnnnnnnnnnnnnnnnnnnnnnnnnnnnnnnnnnnnnnnnnnnnnnnnnnnnnnnnnnnnnnnnnnnnnnnnnnnnnnnnnnnnnnnnnnnnnnnnnnnnnnnnnnnnnnnnnnnnnnnnnnnnnnnnnnnnnnnnnnnnnnnnnnnnnnnnnnnnnnnnnnnnnnnnnnnnnnnnnnnnnnnnnnnnnnnnnnnnnnnnnnnnnnnnnnnnnnnnnnnnnnnnnnnnnnnnnnnnnnnnnnnnnnnnnnnnnnnnnnnnnnnnnnnnnnnnnnnnnnnnnnnnnnnnnnnnnnnnnnnnnnnnnnnnnnnnnnnnnnnnnnnnnnnnnnnnnnnnnnnnnnnnnnnnnnnnnnnnnnnnnnnnnnnnnnnnnnnnnnnnnnnnnnnnnnnnnnnnnnnnnnnnnnnnnnnnnnnnnnnnnnnnnnnnnnnnnnnnnnnnnnnnnnnnnnnnnnnnnnnnnnnnnnnnnnnnnnnnnnnnnnnnnnnnnnnnnnnnnnnnnnnnnnnnnnnnnnnnnnnnnnnnnnnnnnnnnnnnnnnnnnnnnnnnnnnnnnnnnnnnnnnnnnnnnnnnnnnnnnnnnnnnnnnnnnnnnnnnnnnnnnnnnnnnnnnnnnnnnnnnnnnnnnnnnnnnnnnnnnnnnnnnnnnnnnnnnnnnnnnnnnnnnnnnnnnnnnnnnnnnnnnnnnnnnnnnnnnnnnnnnnnnnnnnnnnnnnnnnnnnnnnnnnnnnnnnnnnnnnnnnnnnnnnnnnnnnnnnnnnnnnnnnnnnnnnnnnnnnnnnnnnnnnnnnnnnnnnnnnnnnnnnnnnnnnnnnnnnnnnnnnnnnnnnnnnnnnnnnnnnnnnnnnnnnnnnnnnnnnnnnnnnnnnnnnnnnnnnnnnnnnnnnnnnnnnnnnnnnnnnnnnnnnnnnnnnnnnnnnnnnnnnnnnnnnnnnnnnnnnnnnnnnnnnnnnnnnnnnnnnnnnnnnnnnnnnnnnnnnnnnnnnnnnnnnnnnnnnnnnnnnnnnnnnnnnnnnnnnnnnnnnnnnnnnnnnnnnnnnnnnnnnnnnnnnnnnnnnnnnnnnnnnnnnnnnnnnnnnnnnnnnnnnnnnnnnnnnnnnnnnnnnnnnnnnnnnnnnnnnnnnnnnnnnnnnnnnnnnnnnnnnnnnnnnnnnnnnnnnnnnnnnnnnnnnnnnnnnnnnnnnnnnnnnnnnnnnnnnnnnnnnnnnnnnnnnnnnnnnnnnnnnnnnnnnnnnnnnnnnnnnnnnnnnnnnnnnnnnnnnnnnnnnnnnnnnnnnnnnnnnnnnnnnnnnnnnnnnnnnnnnnnnnnnnnnnnnnnnnnnnnnnnnnnnnnnnnnnnnnnnnnnnnnnnnnnnnnnnnnnnnnnnnnnnnnnnnnnnnnnnnnnnnnnnnnnnnnnnnnnnnnnnnnnnnnnnnnnnnnnnnnnnnnnnnnnnnnnnnnnnnnnnnnnnnnnnnnnnnnnnnnnnnnnnnnnnnnnnnnnnnnnnnnnnnnnnnnnnnnnnnnnnnnnnnnnnnnnnnnnnnnnnnnnnnnnnnnnnnnnnnnnnnnnnnnnnnnnnnnnnnnnnnnnnnnnnnnnnnnnnnnnnnnnnnnnnnnnnnnnnnnnnnnnnnnnnnnnnnnnnnnnnnnnnnnnnnnnnnnnnnnnnnnnnnnnnnnnnnnnnnnnnnnnnnnnnnnnnnnnnnnnnnnnnnnnnnnnnnnnnnnnnnnnnnnnnnnnnnnnnnnnnnnnnnnnnnnnnnnnnnnnnnnnnnnnnnnnnnnnnnnnnnnnnnnnnnnnnnnnnnnnnnnnnnnnnnnnnnnnnnnnnnnnnnnnnnnnnnnnnnnnnnnnnnnnnnnnnnnnnnnnnnnnnnnnnnnnnnnnnnnnnnnnnnnnnnnnnnnnnnnnnnnnnnnnnnnnnnnnnnnnnnnnnnnnnnnnnnnnnnnnnnnnnnnnnnnnnnnnnnnnnnnnnnnnnnnnnnnnnnnnnnnnnnnnnnnnnnnnnnnnnnnnnnnnnnnnnnnnnnnnnnnnnnnnnnnnnnnnnnnnnnnnnnnnnnnnnnnnnnnnnnnnnnnnnnnnnnnnnnnnnnnnnnnnnnnnnnnnnnnnnnnnnnnnnnnnnnnnnnnnnnnnnnnnnnnnnnnnnnnnnnnnnnnnnnnnnnnnnnnnnnnnnnnnnnnnnnnnnnnnnnnnnnnnnnnnnnnnnnnnnnnnnnnnnnnnnnnnnnnnnnnnnnnnnnnnnnnnnnnnnnnnnnnnnnnnnnnnnnnnnnnnnnnnnnnnnnnnnnnnnnnnnnnnnnnnnnnnnnnnnnnnnnnnnnnnnnnnnnnnnnnnnnnnnnnnnnnnnnnnnnnnnnnnnnnnnnnnnnnnnnnnnnnnnnnnnnnnnnnnnnnnnnnnnnnnnnnnnnnnnnnnnnnnnnnnnnnnnnnnnnnnnnnnnnnnnnnnnnnnnnnnnnnnnnnnnnnnnnnnnnnnnnnnnnnnnnnnnnnnnnnnnnnnnnnnnnnnnnnnnnnnnnnnnnnnnnnnnnnnnnnnnnnnnnnnnnnnnnnnnnnnnnnnnnnnnnnnnnnnnnnnnnnnnnnnnnnnnnnnnnnnnnnnnnnnnnnnnnnnnnnnnnnnnnnnnnnnnnnnnnnnnnnnnnnnnnnnnnnnnnnnnnnnnnnnnnnnnnnnnnnnnnnnnnnnnnnnnnnnnnnnnnnnnnnnnnnnnnnnnnnnnnnnnnnnnnnnnnnnnnnnnnnnnnnnnnnnnnnnnnnnnnnnnnnnnnnnnnnnnnnnnnnnnnnnnnnnnnnnnnnnnnnnnnnnnnnnnnnnnnnnnnnnnnnnnnnnnnnnnnnnnnnnnnnnnnnnnnnnnnnnnnnnnnnnnnnnnnnnnnnnnnnnnnnnnnnnnnnnnnnnnnnnnnnnnnnnnnnnnnnnnnnnnnnnnnnnnnnnnnnnnnnnnnnnnnnnnnnnnnnnnnnnnnnnnnnnnnnnnnnnnnnnnnnnnnnnnnnnnnnnnnnnnnnnnnnnnnnnnnnnnnnnnnnnnnnnnnnnnnnnnnnnnnnnnnnnnnnnnnnnnnnnnnnnnnnnnnnnnnnnnnnnnnnnnnnnnnnnnnnnnnnnnnnnnnnnnnnnnnnnnnnnnnnnnnnnnnnnnnnnnnnnnnnnnnnnnnnnnnnnnnnnnnnnnnnnnnnnnnnnnnnnnnnnnnnnnnnnnnnnnnnnnnnnnnnnnnnnnnnnnnnnnnnnnnnnnnnnnnnnnnnnnnnnnnnnnnnnnnnnnnnnnnnnnnnnnnnnnnnnnnnnnnnnnnnnnnnnnnnnnnnnnnnnnnnnnnnnnnnnnnnnnnnnnnnnnnnnnnnnnnnnnnnnnnnnnnnnnnnnnnnnnnnnnnnnnnnnnnnnnnnnnnnnnnnnnnnnnnnnnnnnnnnnnnnnnnnnnnnnnnnnnnnnnnnnnnnnnnnnnnnnnnnnnnnnnnnnnnnnnnnnnnnnnnnnnnnnnnnnnnnnnnnnnnnnnnnnnnnnnnnnnnnnnnnnnnnnnnnnnnnnnnnnnnnnnnnnnnnnnnnnnnnnnnnnnnnnnnnnnnnnnnnnnnnnnnnnnnnnnnnnnnnnnnnnnnnnnnnnnnnnnnnnnnnnnnnnnnnnnnnnnnnnnnnnnnnnnnnnnnnnnnnnnnnnnnnnnnnnnnnnnnnnnnnnnnnnnnnnnnnnnnnnnnnnnnnnnnnnnnnnnnnnnnnnnnnnnnnnnnnnnnnnnnnnnnnnnnnnnnnnnnnnnnnnnnnnnnnnnnnnnnnnnnnnnnnnnnnnnnnnnnnnnnnnnnnnnnnnnnnnnnnnnnnnnnnnnnnnnnnnnnnnnnnnnnnnnnnnnnnnnnnnnnnnnnnnnnnnnnnnnnnnnnnnnnnnnnnnnnnnnnnnnnnnnnnnnnnnnnnnnnnnnnnnnnnnnnnnnnnnnnnnnnnnnnnnnnnnnnnnnnnnnnnnnnnnnnnnnnnnnnnnnnnnnnnnnnnnnnnnnnnnnnnnnnnnnnnnnnnnnnnnnnnnnnnnnnnnnnnnnnnnnnnnnnnnnnnnnnnnnnnnnnnnnnnnnnnnnnnnnnnnnnnnnnnnnnnnnnnnnnnnnnnnnnnnnnnnnnnnnnnnnnnnnnnnnnnnnnnnnnnnnnnnnnnnnnnnnnnnnnnnnnnnnnnnnnnnnnnnnnnnnnnnnnnnnnnnnnnnnnnnnnnnnnnnnnnnnnnnnnnnnnnnnnnnnnnnnnnnnnnnnnnnnnnnnnnnnnnnnnnnnnnnnnnnnnnnnnnnnnnnnnnnnnnnnnnnnnnnnnnnnnnnnnnnnnnnnnnnnnnnnnnnnnnnnnnnnnnnnnnnnnnnnnnnnnnnnnnnnnnnnnnnnnnnnnnnnnnnnnnnnnnnnnnnnnnnnnnnnnnnnnnnnnnnnnnnnnnnnnnnnnnnnnnnnnnnnnnnnnnnnnnnnnnnnnnnnnnnnnnnnnnnnnnnnnnnnnnnnnnnnnnnnnnnnnnnnnnnnnnnnnnnnnnnnnnnnnnnnnnnnnnnnnnnnnnnnnnnnnnnnnnnnnnnnnnnnnnnnnnnnnnnnnnnnnnnnnnnnnnnnnnnnnnnnnnnnnnnnnnnnnnnnnnnnnnnnnnnnnnnnnnnnnnnnnnnnnnnnnnnnnnnnnnnnnnnnnnnnnnnnnnnnnnnnnnnnnnnnnnnnnnnnnnnnnnnnnnnnnnnnnnnnnnnnnnnnnnnnnnnnnnnnnnnnnnnnnnnnnnnnnnnnnnnnnnnnnnnnnnnnnnnnnnnnnnnnnnnnnnnnnnnnnnnnnnnnnnnnnnnnnnnnnnnnnnnnnnnnnnnnnnnnnnnnnnnnnnnnnnnnnnnnnnnnnnnnnnnnnnnnnnnnnnnnnnnnnnnnnnnnnnnnnnnnnnnnnnnnnnnnnnnnnnnnnnnnnnnnnnnnnnnnnnnnnnnnnnnnnnnnnnnnnnnnnnnnnnnnnnnnnnnnnnnnnnnnnnnnnnnnnnnnnnnnnnnnnnnnnnnnnnnnnnnnnnnnnnnnnnnnnnnnnnnnnnnnnnnnnnnnnnnnnnnnnnnnnnnnnnnnnnnnnnnnnnnnnnnnnnnnnnnnnnnnnnnnnnnnnnnnnnnnnnnnnnnnnnnnnnnnnnnnnnnnnnnnnnnnnnnnnnnnnnnnnnnnnnnnnnnnnnnnnnnnnnnnnnnnnnnnnnnnnnnnnnnnnnnnnnnnnnnnnnnnnnnnnnnnnnnnnnnnnnnnnnnnnnnnnnnnnnnnnnnnnnnnnnnnnnnnnnnnnnnnnnnnnnnnnnnnnnnnnnnnnnnnnnnnnnnnnnnnnnnnnnnnnnnnnnnnnnnnnnnnnnnnnnnnnnnnnnnnnnnnnnnnnnnnnnnnnnnnnnnnnnnnnnnnnnnnnnnnnnnnnnnnnnnnnnnnnnnnnnnnnnnnnnnnnnnnnnnnnnnnnnnnnnnnnnnnnnnnnnnnnnnnnnnnnnnnnnnnnnnnnnnnnnnnnnnnnnnnnnnnnnnnnnnnnnnnnnnnnnnnnnnnnnnnnnnnnnnnnnnnnnnnnnnnnnnnnnnnnnnnnnnnnnnnnnnnnnnnnnnnnnnnnnnnnnnnnnnnnnnnnnnnnnnnnnnnnnnnnnnnnnnnnnnnnnnnnnnnnnnnnnnnnnnnnnnnnnnnnnnnnnnnnnnnnnnnnnnnnnnnnnnnnnnnnnnnnnnnnnnnnnnnnnnnnnnnnnnnnnnnnnnnnnnnnnnnnnnnnnnnnnnnnnnnnnnnnnnnnnnnnnnnnnnnnnnnnnnnnnnnnnnnnnnnnnnnnnnnnnnnnnnnnnnnnnnnnnnnnnnnnnnnnnnnnnnnnnnnnnnnnnnnnnnnnnnnnnnnnnnnnnnnnnnnnnnnnnnnnnnnnnnnnnnnnnnnnnnnnnnnnnnnnnnnnnnnnnnnnnnnnnnnnnnnnnnnnnnnnnnnnnnnnnnnnnnnnnnnnnnnnnnnnnnnnnnnnnnnnnnnnnnnnnnnnnnnnnnnnnnnnnnnnnnnnnnnnnnnnnnnnnnnnnnnnnnnnnnnnnnnnnnnnnnnnnnnnnnnnnnnnnnnnnnnnnnnnnnnnnnnnnnnnnnnnnnnnnnnnnnnnnnnnnnnnnnnnnnnnnnnnnnnnnnnnnnnnnnnnnnnnnnnnnnnnnnnnnnnnnnnnnnnnnnnnnnnnnnnnnnnnnnnnnnnnnnnnnnnnnnnnnnnnnnnnnnnnnnnnnnnnnnnnnnnnnnnnnnnnnnnnnnnnnnnnnnnnnnnnnnnnnnnnnnnnnnnnnnnnnnnnnnnnnnnnnnnnnnnnnnnnnnnnnnnnnnnnnnnnnnnnnnnnnnnnnnnnnnnnnnnnnnnnnnnnnnnnnnnnnnnnnnnnnnnnnnnnnnnnnnnnnnnnnnnnnnnnnnnnnnnnnnnnnnnnnnnnnnnnnnnnnnnnnnnnnnnnnnnnnnnnnnnnnnnnnnnnnnnnnnnnnnnnnnnnnnnnnnnnnnnnnnnnnnnnnnnnnnnnnnnnnnnnnnnnnnnnnnnnnnnnnnnnnnnnnnnnnnnnnnnnnnnnnnnnnnnnnnnnnnnnnnnnnnnnnnnnnnnnnnnnnnnnnnnnnnnnnnnnnnnnnnnnnnnnnnnnnnnnnnnnnnnnnnnnnnnnnnnnnnnnnnnnnnnnnnnnnnnnnnnnnnnnnnnnnnnnnnnnnnnnnnnnnnnnnnnnnnnnnnnnnnnnnnnnnnnnnnnnnnnnnnnnnnnnnnnnnnnnnnnnnnnnnnnnnnnnnnnnnnnnnnnnnnnnnnnnnnnnnnnnnnnnnnnnnnnnnnnnnnnnnnnnnnnnnnnnnnnnnnnnnnnnnnnnnnnnnnnnnnnnnnnnnnnnnnnnnnnnnnnnnnnnnnnnnnnnnnnnnnnnnnnnnnnnnnnnnnnnnnnnnnnnnnnnnnnnnnnnnnnnnnnnnnnnnnnnnnnnnnnnnnnnnnnnnnnnnnnnnnnnnnnnnnnnnnnnnnnnnnnnnnnnnnnnnnnnnnnnnnnnnnnnnnnnnnnnnnnnnnnnnnnnnnnnnnnnnnnnnnnnnnnnnnnnnnnnnnnnnnnnnnnnnnnnnnnnnnnnnnnnnnnnnnnnnnnnnnnnnnnnnnnnnnnnnnnnnnnnnnnnnnnnnnnnnnnnnnnnnnnnnnnnnnnnnnnnnnnnnnnnnnnnnnnnnnnnnnnnnnnnnnnnnnnnnnnnnnnnnnnnnnnnnnnnnnnnnnnnnnnnnnnnnnnggtctcnngagaccnngtc

SEQ ID NO: 26 - DNA, 300038 bp, Artificial Sequence
  source: /note="Description of Artificial Sequence: Synthetic polynucleotide"
  modified_base (11)..(12): a, c, t, or g
  modified_base (20)..(300019): a, c, t, or g
  misc_feature (20)..(300019): /note="This region may encompass 0-300000 nucleotides"
  modified_base (300027)..(300028): a, c, t, or g
  source: /note="See specification as filed for detailed description of substitutions and preferred embodiments"
gaagctcttcnngaagagcnnnnnnnnnnnnnnnnnnnnnnnnnnnnnnnnnnnnnnnnnnnnnnnnnnnnnnnnnnnnnnnnnnnnnnnnnnnnnnnnnnnnnnnnnnnnnnnnnnnnnnnnnnnnnnnnnnnnnnnnnnnnnnnnnnnnnnnnnnnnnnnnnnnnnnnnnnnnnnnnnnnnnnnnnnnnnnnnnnnnnnnnnnnnnnnnnnnnnnnnnnnnnnnnnnnnnnnnnnnnnnnnnnnnnnnnnnnnnnnnnnnnnnnnnnnnnnnnnnnnnnnnnnnnnnnnnnnnnnnnnnnnnnnnnnnnnnnnnnnnnnnnnnnnnnnnnnnnnnnnnnnnnnnnnnnnnnnnnnnnnnnnnnnnnnnnnnnnnnnnnnnnnnnnnnnnnnnnnnnnnnnnnnnnnnnnnnnnnnnnnnnnnnnnnnnnnnnnnnnnnnnnnnnnnnnnnnnnnnnnnnnnnnnnnnnnnnnnnnnnnnnnnnnnnnnnnnnnnnnnnnnnnnnnnnnnnnnnnnnnnnnnnnnnnnnnnnnnnnnnnnnnnnnnnnnnnnnnnnnnnnnnnnnnnnnnnnnnnnnnnnnnnnnnnnnnnnnnnnnnnnnnnnnnnnnnnnnnnnnnnnnnnnnnnnnnnnnnnnnnnnnnnnnnnnnnnnnnnnnnnnnnnnnnnnnnnnnnnnnnnnnnnnnnnnnnnnnnnnnnnnnnnnnnnnnnnnnnnnnnnnnnnnnnnnnnnnnnnnnnnnnnnnnnnnnnnnnnnnnnnnnnnnnnnnnnnnnnnnnnnnnnnnnnnnnnnnnnnnnnnnnnnnnnnnnnnnnnnnnnnnnnnnnnnnnnnnnnnnnnnnnnnnnnnnnnnnnnnnnnnnnnnnnnnnnnnnnnnnnnnnnnnnnnnnnnnnnnnnnnnnnnnnnnnnnnnnnnnnnnnnnnnnnnnnnnnnnnnnnnnnnnnnnnnnnnnnnnnnnnnnnnnnnnnnnnnnnnnnnnnnnnnnnnnnnnnnnnnnnnnnnnnnnnnnnnnnnnnnnnnnnnnnnnnnnnnnnnnnnnnnnnnnnnnnnnnnnnnnnnnnnnnnnnnnnnnnnnnnnnnnnnnnnnnnnnnnnnnnnnnnnnnnnnnnnnnnnnnnnnnnnnnnnnnnnnnnnnnnnnnnnnnnnnnnnnnnnnnnnnnnnnnnnnnnnnnnnnnnnnnnnnnnnnnnnnnnnnnnnnnnnnnnnnnnnnnnnnnnnnnnnnnnnnnnnnnnnnnnnnnnnnnnnnnnnnnnnnnnnnnnnnnnnnnnnnnnnnnnnnnnnnnnnnnnnnnnnnnnnnnnnnnnnnnnnnnnnnnnnnnnnnnnnnnnnnnnnnnnnnnnnnnnnnnnnnnnnnnnnnnnnnnnnnnnnnnnnnnnnnnnnnnnnnnnnnnnnnnnnnnnnnnnnnnnnnnnnnnnnnnnnnnnnnnnnnnnnnnnnnnnnnnnnnnnnnnnnnnnnnnnnnnnnnnnnnnnnnnnnnnnnnnnnnnnnnnnnnnnnnnnnnnnnnnnnnnnnnnnnnnnnnnnnnnnnnnnnnnnnnnnnnnnnnnnnnnnnnnnnnnnnnnnnnnnnnnnnnnnnnnnnnnnnnnnnnnnnnnnnnnnnnnnnnnnnnnnnnnnnnnnnnnnnnnnnnnnnnnnnnnnnnnnnnnnnnnnnnnnnnnnnnnnnnnnnnnnnnnnnnnnnnnnnnnnnnnnnnnnnnnnnnnnnnnnnnnnnnnnnnnnnnnnnnnnnnnnnnnnnnnnnnnnnnnnnnnnnnnnnnnnnnnnnnnnnnnnnnnnnnnnnnnnnnnnnnnnnnnnnnnnnnnnnnnnnnnnnnnnnnnnnnnnnnnnnnnnnnnnnnnnnnnnnnnnnnnnnnnnnnnnnnnnnnnnnnnnnnnnnnnnnnnnnnnnnnnnnnnnnnnnnnnnnnnnnnnnnnnnnnnnnnnnnnnnnnnnnnnnnnnnnnnnnnnnnnnnnnnnnnnnnnnnnnnnnnnnnnnnnnnnnnnnnnnnnnnnnnnnnnnnnnnnnnnnnnnnnnnnnnnnnnnnnnnnnnnnnnnnnnnnnnnnnnnnnnnnnnnnnnnnnnnnnnnnnnnnnnnnnnnnnnnnnnnnnnnnnnnnnnnnnnnnnnnnnnnnnnnnnnnnnnnnnnnnnnnnnnnnnnnnnnnnnnnnnnnnnnnnnnnnnnnnnnnnnnnnnnnnnnnnnnnnnnnnnnnnnnnnnnnnnnnnnnnnnnnnnnnnnnnnnnnnnnnnnnnnnnnnnnnnnnnnnnnnnnnnnnnnnnnnnnnnnnnnnnnnnnnnnnnnnnnnnnnnnnnnnnnnnnnnnnnnnnnnnnnnnnnnnnnnnnnnnnnnnnnnnnnnnnnnnnnnnnnnnnnnnnnnnnnnnnnnnnnnnnnnnnnnnnnnnnnnnnnnnnnnnnnnnnnnnnnnnnnnnnnnnnnnnnnnnnnnnnnnnnnnnnnnnnnnnnnnnnnnnnnnnnnnnnnnnnnnnnnnnnnnnnnnnnnnnnnnnnnnnnnnnnnnnnnnnnnnnnnnnnnnnnnnnnnnnnnnnnnnnnnnnnnnnnnnnnnnnnnnnnnnnnnnnnnnnnnnnnnnnnnnnnnnnnnnnnnnnnnnnnnnnnnnnnnnnnnnnnnnnnnnnnnnnnnnnnnnnnnnnnnnnnnnnnnnnnnnnnnnnnnnnnnnnnnnnnnnnnnnnnnnnnnnnnnnnnnnnnnnnnnnnnnnnnnnnnnnnnnnnnnnnnnnnnnnnnnnnnnnnnnnnnnnnnnnnnnnnnnnnnnnnnnnnnnnnnnnnnnnnnnnnnnnnnnnnnnnnnnnnnnnnnnnnnnnnnnnnnnnnnnnnnnnnnnnnnnnnnnnnnnnnnnnnnnnnnnnnnnnnnnnnnnnnnnnnnnnnnnnnnnnnnnnnnnnnnnnnnnnnnnnnnnnnnnnnnnnnnnnnnnnnnnnnnnnnnnnnnnnnnnnnnnnnnnnnnnnnnnnnnnnnnnnnnnnnnnnnnnnnnnnnnnnnnnnnnnnnnnnnnnnnnnnnnnnnnnnnnnnnnnnnnnnnnnnnnnnnnnnnnnnnnnnnnnnnnnnnnnnnnnnnnnnnnnnnnnnnnnnnnnnnnnnnnnnnnnnnnnnnnnnnnnnnnnnnnnnnnnnnnnnnnnnnnnnnnnnnnnnnnnnnnnnnnnnnnnnnnnnnnnnnnnnnnnnnnnnnnnnnnnnnnnnnnnnnnnnnnnnnnnnnnnnnnnnnnnnnnnnnnnnnnnnnnnnnnnnnnnnnnnnnnnnnnnnnnnnnnnnnnnnnnnnnnnnnnnnnnnnnnnnnnnnnnnnnnnnnnnnnnnnnnnnnnnnnnnnnnnnnnnnnnnnnnnnnnnnnnnnnnnnnnnnnnnnnnnnnnnnnnnnnnnnnnnnnnnnnnnnnnnnnnnnnnnnnnnnnnnnnnnnnnnnnnnnnnnnnnnnnnnnnnnnnnnnnnnnnnnnnnnnnnnnnnnnnnnnnnnnnnnnnnnnnnnnnnnnnnnnnnnnnnnnnnnnnnnnnnnnnnnnnnnnnnnnnnnnnnnnnnnnnnnnnnnnnnnnnnnnnnnnnnnnnnnnnnnnnnnnnnnnnnnnnnnnnnnnnnnnnnnnnnnnnnnnnnnnnnnnnnnnnnnnnnnnnnnnnnnnnnnnnnnnnnnnnnnnnnnnnnnnnnnnnnnnnnnnnnnnnnnnnnnnnnnnnnnnnnnnnnnnnnnnnnnnnnnnnnnnnnnnnnnnnnnnnnnnnnnnnnnnnnnnnnnnnnnnnnnnnnnnnnnnnnnnnnnnnnnnnnnnnnnnnnnnnnnnnnnnnnnnnnnnnnnnnnnnnnnnnnnnnnnnnnnnnnnnnnnnnnnnnnnnnnnnnnnnnnnnnnnnnnnnnnnnnnnnnnnnnnnnnnnnnnnnnnnnnnnnnnnnnnnnnnnnnnnnnnnnnnnnnnnnnnnnnnnnnnnnnnnnnnnnnnnnnnnnnnnnnnnnnnnnnnnnnnnnnnnnnnnnnnnnnnnnnnnnnnnnnnnnnnnnnnnnnnnnnnnnnnnnnnnnnnnnnnnnnnnnnnnnnnnnnnnnnnnnnnnnnnnnnnnnnnnnnnnnnnnnnnnnnnnnnnnnnnnnnnnnnnnnnnnnnnnnnnnnnnnnnnnnnnnnnnnnnnnnnnnnnnnnnnnnnnnnnnnnnnnnnnnnnnnnnnnnnnnnnnnnnnnnnnnnnnnnnnnnnnnnnnnnnnnnnnnnnnnnnnnnnnnnnnnnnnnnnnnnnnnnnnnnnnnnnnnnnnnnnnnnnnnnnnnnnnnnnnnnnnnnnnnnnnnnnnnnnnnnnnnnnnnnnnnnnnnnnnnnnnnnnnnnnnnnnnnnnnnnnnnnnnnnnnnnnnnnnnnnnnnnnnnnnnnnnnnnnnnnnnnnnnnnnnnnnnnnnnnnnnnnnnnnnnnnnnnnnnnnnnnnnnnnnnnnnnnnnnnnnnnnnnnnnnnnnnnnnnnnnnnnnnnnnnnnnnnnnnnnnnnnnnnnnnnnnnnnnnnnnnnnnnnnnnnnnnnnnnnnnnnnnnnnnnnnnnnnnnnnnnnnnnnnnnnnnnnnnnnnnnnnnnnnnnnnnnnnnnnnnnnnnnnnnnnnnnnnnnnnnnnnnnnnnnnnnnnnnnnnnnnnnnnnnnnnnnnnnnnnnnnnnnnnnnnnnnnnnnnnnnnnnnnnnnnnnnnnnnnnnnnnnnnnnnnnnnnnnnnnnnnnnnnnnnnnnnnnnnnnnnnnnnnnnnnnnnnnnnnnnnnnnnnnnnnnnnnnnnnnnnnnnnnnnnnnnnnnnnnnnnnnnnnnnnnnnnnnnnnnnnnnnnnnnnnnnnnnnnnnnnnnnnnnnnnnnnnnnnnnnnnnnnnnnnnnnnnnnnnnnnnnnnnnnnnnnnnnnnnnnnnnnnnnnnnnnnnnnnnnnnnnnnnnnnnnnnnnnnnnnnnnnnnnnnnnnnnnnnnnnnnnnnnnnnnnnnnnnnnnnnnnnnnnnnnnnnnnnnnnnnnnnnnnnnnnnnnnnnnnnnnnnnnnnnnnnnnnnnnnnnnnnnnnnnnnnnnnnnnnnnnnnnnnnnnnnnnnnnnnnnnnnnnnnnnnnnnnnnnnnnnnnnnnnnnnnnnnnnnnnnnnnnnnnnnnnnnnnnnnnnnnnnnnnnnnnnnnnnnnnnnnnnnnnnnnnnnnnnnnnnnnnnnnnnnnnnnnnnnnnnnnnnnnnnnnnnnnnnnnnnnnnnnnnnnnnnnnnnnnnnnnnnnnnnnnnnnnnnnnnnnnnnnnnnnnnnnnnnnnnnnnnnnnnnnnnnnnnnnnnnnnnnnnnnnnnnnnnnnnnnnnnnnnnnnnnnnnnnnnnnnnnnnnnnnnnnnnnnnnnnnnnnnnnnnnnnnnnnnnnnnnnnnnnnnnnnnnnnnnnnnnnnnnnnnnnnnnnnnnnnnnnnnnnnnnnnnnnnnnnnnnnnnnnnnnnnnnnnnnnnnnnnnnnnnnnnnnnnnnnnnnnnnnnnnnnnnnnnnnnnnnnnnnnnnnnnnnnnnnnnnnnnnnnnnnnnnnnnnnnnnnnnnnnnnnnnnnnnnnnnnnnnnnnnnnnnnnnnnnnnnnnnnnnnnnnnnnnnnnnnnnnnnnnnnnnnnnnnnnnnnnnnnnnnnnnnnnnnnnnnnnnnnnnnnnnnnnnnnnnnnnnnnnnnnnnnnnnnnnnnnnnnnnnnnnnnnnnnnnnnnnnnnnnnnnnnnnnnnnnnnnnnnnnnnnnnnnnnnnnnnnnnnnnnnnnnnnnnnnnnnnnnnnnnnnnnnnnnnnnnnnnnnnnnnnnnnnnnnnnnnnnnnnnnnnnnnnnnnnnnnnnnnnnnnnnnnnnnnnnnnnnnnnnnnnnnnnnnnnnnnnnnnnnnnnnnnnnnnnnnnnnnnnnnnnnnnnnnnnnnnnnnnnnnnnnnnnnnnnnnnnnnnnnnnnnnnnnnnnnnnnnnnnnnnnnnnnnnnnnnnnnnnnnnnnnnnnnnnnnnnnnnnnnnnnnnnnnnnnnnnnnnnnnnnnnnnnnnnnnnnnnnnnnnnnnnnnnnnnnnnnnnnnnnnnnnnnnnnnnnnnnnnnnnnnnnnnnnnnnnnnnnnnnnnnnnnnnnnnnnnnnnnnnnnnnnnnnnnnnnnnnnnnnnnnnnnnnnnnnnnnnnnnnnnnnnnnnnnnnnnnnnnnnnnnnnnnnnnnnnnnnnnnnnnnnnnnnnnnnnnnnnnnnnnnnnnnnnnnnnnnnnnnnnnnnnnnnnnnnnnnnnnnnnnnnnnnnnnnnnnnnnnnnnnnnnnnnnnnnnnnnnnnnnnnnnnnnnnnnnnnnnnnnnnnnnnnnnnnnnnnnnnnnnnnnnnnnnnnnnnnnnnnnnnnnnnnnnnnnnnnnnnnnnnnnnnnnnnnnnnnnnnnnnnnnnnnnnnnnnnnnnnnnnnnnnnnnnnnnnnnnnnnnnnnnnnnnnnnnnnnnnnnnnnnnnnnnnnnnnnnnnnnnnnnnnnnnnnnnnnnnnnnnnnnnnnnnnnnnnnnnnnnnnnnnnnnnnnnnnnnnnnnnnnnnnnnnnnnnnnnnnnnnnnnnnnnnnnnnnnnnnnnnnnnnnnnnnnnnnnnnnnnnnnnnnnnnnnnnnnnnnnnnnnnnnnnnnnnnnnnnnnnnnnnnnnnnnnnnnnnnnnnnnnnnnnnnnnnnnnnnnnnnnnnnnnnnnnnnnnnnnnnnnnnnnnnnnnnnnnnnnnnnnnnnnnnnnnnnnnnnnnnnnnnnnnnnnnnnnnnnnnnnnnnnnnnnnnnnnnnnnnnnnnnnnnnnnnnnnnnnnnnnnnnnnnnnnnnnnnnnnnnnnnnnnnnnnnnnnnnnnnnnnnnnnnnnnnnnnnnnnnnnnnnnnnnnnnnnnnnnnnnnnnnnnnnnnnnnnnnnnnnnnnnnnnnnnnnnnnnnnnnnnnnnnnnnnnnnnnnnnnnnnnnnnnnnnnnnnnnnnnnnnnnnnnnnnnnnnnnnnnnnnnnnnnnnnnnnnnnnnnnnnnnnnnnnnnnnnnnnnnnnnnnnnnnnnnnnnnnnnnnnnnnnnnnnnnnnnnnnnnnnnnnnnnnnnnnnnnnnnnnnnnnnnnnnnnnnnnnnnnnnnnnnnnnnnnnnnnnnnnnnnnnnnnnnnnnnnnnnnnnnnnnnnnnnnnnnnnnnnnnnnnnnnnnnnnnnnnnnnnnnnnnnnnnnnnnnnnnnnnnnnnnnnnnnnnnnnnnnnnnnnnnnnnnnnnnnnnnnnnnnnnnnnnnnnnnnnnnnnnnnnnnnnnnnnnnnnnnnnnnnnnnnnnnnnnnnnnnnnnnnnnnnnnnnnnnnnnnnnnnnnnnnnnnnnnnnnnnnnnnnnnnnnnnnnnnnnnnnnnnnnnnnnnnnnnnnnnnnnnnnnnnnnnnnnnnnnnnnnnnnnnnnnnnnnnnnnnnnnnnnnnnnnnnnnnnnnnnnnnnnnnnnnnnnnnnnnnnnnnnnnnnnnnnnnnnnnnnnnnnnnnnnnnnnnnnnnnnnnnnnnnnnnnnnnnnnnnnnnnnnnnnnnnnnnnnnnnnnnnnnnnnnnnnnnnnnnnnnnnnnnnnnnnnnnnnnnnnnnnnnnnnnnnnnnnnnnnnnnnnnnnnnnnnnnnnnnnnnnnnnnnnnnnnnnnnnnnnnnnnnnnnnnnnnnnnnnnnnnnnnnnnnnnnnnnnnnnnnnnnnnnnnnnnnnnnnnnnnnnnnnnnnnnnnnnnnnnnnnnnnnnnnnnnnnnnnnnnnnnnnnnnnnnnnnnnnnnnnnnnnnnnnnnnnnnnnnnnnnnnnnnnnnnnnnnnnnnnnnnnnnnnnnnnnnnnnnnnnnnnnnnnnnnnnnnnnnnnnnnnnnnnnnnnnnnnnnnnnnnnnnnnnnnnnnnnnnnnnnnnnnnnnnnnnnnnnnnnnnnnnnnnnnnnnnnnnnnnnnnnnnnnnnnnnnnnnnnnnnnnnnnnnnnnnnnnnnnnnnnnnnnnnnnnnnnnnnnnnnnnnnnnnnnnnnnnnnnnnnnnnnnnnnnnnnnnnnnnnnnnnnnnnnnnnnnnnnnnnnnnnnnnnnnnnnnnnnnnnnnnnnnnnnnnnnnnnnnnnnnnnnnnnnnnnnnnnnnnnnnnnnnnnnnnnnnnnnnnnnnnnnnnnnnnnnnnnnnnnnnnnnnnnnnnnnnnnnnnnnnnnnnnnnnnnnnnnnnnnnnnnnnnnnnnnnnnnnnnnnnnnnnnnnnnnnnnnnnnnnnnnnnnnnnnnnnnnnnnnnnnnnnnnnnnnnnnnnnnnnnnnnnnnnnnnnnnnnnnnnnnnnnnnnnnnnnnnnnnnnnnnnnnnnnnnnnnnnnnnnnnnnnnnnnnnnnnnnnnnnnnnnnnnnnnnnnnnnnnnnnnnnnnnnnnnnnnnnnnnnnnnnnnnnnnnnnnnnnnnnnnnnnnnnnnnnnnnnnnnnnnnnnnnnnnnnnnnnnnnnnnnnnnnnnnnnnnnnnnnnnnnnnnnnnnnnnnnnnnnnnnnnnnnnnnnnnnnnnnnnnnnnnnnnnnnnnnnnnnnnnnnnnnnnnnnnnnnnnnnnnnnnnnnnnnnnnnnnnnnnnnnnnnnnnnnnnnnnnnnnnnnnnnnnnnnnnnnnnnnnnnnnnnnnnnnnnnnnnnnnnnnnnnnnnnnnnnnnnnnnnnnnnnnnnnnnnnnnnnnnnnnnnnnnnnnnnnnnnnnnnnnnnnnnnnnnnnnnnnnnnnnnnnnnnnnnnnnnnnnnnnnnnnnnnnnnnnnnnnnnnnnnnnnnnnnnnnnnnnnnnnnnnnnnnnnnnnnnnnnnnnnnnnnnnnnnnnnnnnnnnnnnnnnnnnnnnnnnnnnnnnnnnnnnnnnnnnnnnnnnnnnnnnnnnnnnnnnnnnnnnnnnnnnnnnnnnnnnnnnnnnnnnnnnnnnnnnnnnnnnnnnnnnnnnnnnnnnnnnnnnnnnnnnnnnnnnnnnnnnnnnnnnnnnnnnnnnnnnnnnnnnnnnnnnnnnnnnnnnnnnnnnnnnnnnnnnnnnnnnnnnnnnnnnnnnnnnnnnnnnnnnnnnnnnnnnnnnnnnnnnnnnnnnnnnnnnnnnnnnnnnnnnnnnnnnnnnnnnnnnnnnnnnnnnnnnnnnnnnnnnnnnnnnnnnnnnnnnnnnnnnnnnnnnnnnnnnnnnnnnnnnnnnnnnnnnnnnnnnnnnnnnnnnnnnnnnnnnnnnnnnnnnnnnnnnnnnnnnnnnnnnnnnnnnnnnnnnnnnnnnnnnnnnnnnnnnnnnnnnnnnnnnnnnnnnnnnnnnnnnnnnnnnnnnnnnnnnnnnnnnnnnnnnnnnnnnnnnnnnnnnnnnnnnnnnnnnnnnnnnnnnnnnnnnnnnnnnnnnnnnnnnnnnnnnnnnnnnnnnnnnnnnnnnnnnnnnnnnnnnnnnnnnnnnnnnnnnnnnnnnnnnnnnnnnnnnnnnnnnnnnnnnnnnnnnnnnnnnnnnnnnnnnnnnnnnnnnnnnnnnnnnnnnnnnnnnnnnnnnnnnnnnnnnnnnnnnnnnnnnnnnnnnnnnnnnnnnnnnnnnnnnnnnnnnnnnnnnnnnnnnnnnnnnnnnnnnnnnnnnnnnnnnnnnnnnnnnnnnnnnnnnnnnnnnnnnnnnnnnnnnnnnnnnnnnnnnnnnnnnnnnnnnnnnnnnnnnnnnnnnnnnnnnnnnnnnnnnnnnnnnnnnnnnnnnnnnnnnnnnnnnnnnnnnnnnnnnnnnnnnnnnnnnnnnnnnnnnnnnnnnnnnnnnnnnnnnnnnnnnnnnnnnnnnnnnnnnnnnnnnnnnnnnnnnnnnnnnnnnnnnnnnnnnnnnnnnnnnnnnnnnnnnnnnnnnnnnnnnnnnnnnnnnnnnnnnnnnnnnnnnnnnnnnnnnnnnnnnnnnnnnnnnnnnnnnnnnnnnnnnnnnnnnnnnnnnnnnnnnnnnnnnnnnnnnnnnnnnnnnnnnnnnnnnnnnnnnnnnnnnnnnnnnnnnnnnnnnnnnnnnnnnnnnnnnnnnnnnnnnnnnnnnnnnnnnnnnnnnnnnnnnnnnnnnnnnnnnnnnnnnnnnnnnnnnnnnnnnnnnnnnnnnnnnnnnnnnnnnnnnnnnnnnnnnnnnnnnnnnnnnnnnnnnnnnnnnnnnnnnnnnnnnnnnnnnnnnnnnnnnnnnnnnnnnnnnnnnnnnnnnnnnnnnnnnnnnnnnnnnnnnnnnnnnnnnnnnnnnnnnnnnnnnnnnnnnnnnnnnnnnnnnnnnnnnnnnnnnnnnnnnnnnnnnnnnnnnnnnnnnnnnnnnnnnnnnnnnnnnnnnnnnnnnnnnnnnnnnnnnnnnnnnnnnnnnnnnnnnnnnnnnnnnnnnnnnnnnnnnnnnnnnnnnnnnnnnnnnnnnnnnnnnnnnnnnnnnnnnnnnnnnnnnnnnnnnnnnnnnnnnnnnnnnnnnnnnnnnnnnnnnnnnnnnnnnnnnnnnnnnnnnnnnnnnnnnnnnnnnnnnnnnnnnnnnnnnnnnnnnnnnnnnnnnnnnnnnnnnnnnnnnnnnnnnnnnnnnnnnnnnnnnnnnnnnnnnnnnnnnnnnnnnnnnnnnnnnnnnnnnnnnnnnnnnnnnnnnnnnnnnnnnnnnnnnnnnnnnnnnnnnnnnnnnnnnnnnnnnnnnnnnnnnnnnnnnnnnnnnnnnnnnnnnnnnnnnnnnnnnnnnnnnnnnnnnnnnnnnnnnnnnnnnnnnnnnnnnnnnnnnnnnnnnnnnnnnnnnnnnnnnnnnnnnnnnnnnnnnnnnnnnnnnnnnnnnnnnnnnnnnnnnnnnnnnnnnnnnnnnnnnnnnnnnnnnnnnnnnnnnnnnnnnnnnnnnnnnnnnnnnnnnnnnnnnnnnnnnnnnnnnnnnnnnnnnnnnnnnnnnnnnnnnnnnnnnnnnnnnnnnnnnnnnnnnnnnnnnnnnnnnnnnnnnnnnnnnnnnnnnnnnnnnnnnnnnnnnnnnnnnnnnnnnnnnnnnnnnnnnnnnnnnnnnnnnnnnnnnnnnnnnnnnnnnnnnnnnnnnnnnnnnnnnnnnnnnnnnnnnnnnnnnnnnnnnnnnnnnnnnnnnnnnnnnnnnnnnnnnnnnnnnnnnnnnnnnnnnnnnnnnnnnnnnnnnnnnnnnnnnnnnnnnnnnnnnnnnnnnnnnnnnnnnnnnnnnnnnnnnnnnnnnnnnnnnnnnnnnnnnnnnnnnnnnnnnnnnnnnnnnnnnnnnnnnnnnnnnnnnnnnnnnnnnnnnnnnnnnnnnnnnnnnnnnnnnnnnnnnnnnnnnnnnnnnnnnnnnnnnnnnnnnnnnnnnnnnnnnnnnnnnnnnnnnnnnnnnnnnnnnnnnnnnnnnnnnnnnnnnnnnnnnnnnnnnnnnnnnnnnnnnnnnnnnnnnnnnnnnnnnnnnnnnnnnnnnnnnnnnnnnnnnnnnnnnnnnnnnnnnnnnnnnnnnnnnnnnnnnnnnnnnnnnnnnnnnnnnnnnnnnnnnnnnnnnnnnnnnnnnnnnnnnnnnnnnnnnnnnnnnnnnnnnnnnnnnnnnnnnnnnnnnnnnnnnnnnnnnnnnnnnnnnnnnnnnnnnnnnnnnnnnnnnnnnnnnnnnnnnnnnnnnnnnnnnnnnnnnnnnnnnnnnnnnnnnnnnnnnnnnnnnnnnnnnnnnnnnnnnnnnnnnnnnnnnnnnnnnnnnnnnnnnnnnnnnnnnnnnnnnnnnnnnnnnnnnnnnnnnnnnnnnnnnnnnnnnnnnnnnnnnnnnnnnnnnnnnnnnnnnnnnnnnnnnnnnnnnnnnnnnnnnnnnnnnnnnnnnnnnnnnnnnnnnnnnnnnnnnnnnnnnnnnnnnnnnnnnnnnnnnnnnnnnnnnnnnnnnnnnnnnnnnnnnnnnnnnnnnnnnnnnnnnnnnnnnnnnnnnnnnnnnnnnnnnnnnnnnnnnnnnnnnnnnnnnnnnnnnnnnnnnnnnnnnnnnnnnnnnnnnnnnnnnnnnnnnnnnnnnnnnnnnnnnnnnnnnnnnnnnnnnnnnnnnnnnnnnnnnnnnnnnnnnnnnnnnnnnnnnnnnnnnnnnnnnnnnnnnnnnnnnnnnnnnnnnnnnnnnnnnnnnnnnnnnnnnnnnnnnnnnnnnnnnnnnnnnnnnnnnnnnnnnnnnnnnnnnnnnnnnnnnnnnnnnnnnnnnnnnnnnnnnnnnnnnnnnnnnnnnnnnnnnnnnnnnnnnnnnnnnnnnnnnnnnnnnnnnnnnnnnnnnnnnnnnnnnnnnnnnnnnnnnnnnnnnnnnnnnnnnnnnnnnnnnnnnnnnnnnnnnnnnnnnnnnnnnnnnnnnnnnnnnnnnnnnnnnnnnnnnnnnnnnnnnnnnnnnnnnnnnnnnnnnnnnnnnnnnnnnnnnnnnnnnnnnnnnnnnnnnnnnnnnnnnnnnnnnnnnnnnnnnnnnnnnnnnnnnnnnnnnnnnnnnnnnnnnnnnnnnnnnnnnnnnnnnnnnnnnnnnnnnnnnnnnnnnnnnnnnnnnnnnnnnnnnnnnnnnnnnnnnnnnnnnnnnnnnnnnnnnnnnnnnnnnnnnnnnnnnnnnnnnnnnnnnnnnnnnnnnnnnnnnnnnnnnnnnnnnnnnnnnnnnnnnnnnnnnnnnnnnnnnnnnnnnnnnnnnnnnnnnnnnnnnnnnnnnnnnnnnnnnnnnnnnnnnnnnnnnnnnnnnnnnnnnnnnnnnnnnnnnnnnnnnnnnnnnnnnnnnnnnnnnnnnnnnnnnnnnnnnnnnnnnnnnnnnnnnnnnnnnnnnnnnnnnnnnnnnnnnnnnnnnnnnnnnnnnnnnnnnnnnnnnnnnnnnnnnnnnnnnnnnnnnnnnnnnnnnnnnnnnnnnnnnnnnnnnnnnnnnnnnnnnnnnnnnnnnnnnnnnnnnnnnnnnnnnnnnnnnnnnnnnnnnnnnnnnnnnnnnnnnnnnnnnnnnnnnnnnnnnnnnnnnnnnnnnnnnnnnnnnnnnnnnnnnnnnnnnnnnnnnnnnnnnnnnnnnnnnnnnnnnnnnnnnnnnnnnnnnnnnnnnnnnnnnnnnnnnnnnnnnnnnnnnnnnnnnnnnnnnnnnnnnnnnnnnnnnnnnnnnnnnnnnnnnnnnnnnnnnnnnnnnnnnnnnnnnnnnnnnnnnnnnnnnnnnnnnnnnnnnnnnnnnnnnnnnnnnnnnnnnnnnnnnnnnnnnnnnnnnnnnnnnnnnnnnnnnnnnnnnnnnnnnnnnnnnnnnnnnnnnnnnnnnnnnnnnnnnnnnnnnnnnnnnnnnnnnnnnnnnnnnnnnnnnnnnnnnnnnnnnnnnnnnnnnnnnnnnnnnnnnnnnnnnnnnnnnnnnnnnnnnnnnnnnnnnnnnnnnnnnnnnnnnnnnnnnnnnnnnnnnnnnnnnnnnnnnnnnnnnnnnnnnnnnnnnnnnnnnnnnnnnnnnnnnnnnnnnnnnnnnnnnnnnnnnnnnnnnnnnnnnnnnnnnnnnnnnnnnnnnnnnnnnnnnnnnnnnnnnnnnnnnnnnnnnnnnnnnnnnnnnnnnnnnnnnnnnnnnnnnnnnnnnnnnnnnnnnnnnnnnnnnnnnnnnnnnnnnnnnnnnnnnnnnnnnnnnnnnnnnnnnnnnnnnnnnnnnnnnnnnnnnnnnnnnnnnnnnnnnnnnnnnnnnnnnnnnnnnnnnnnnnnnnnnnnnnnnnnnnnnnnnnnnnnnnnnnnnnnnnnnnnnnnnnnnnnnnnnnnnnnnnnnnnnnnnnnnnnnnnnnnnnnnnnnnnnnnnnnnnnnnnnnnnnnnnnnnnnnnnnnnnnnnnnnnnnnnnnnnnnnnnnnnnnnnnnnnnnnnnnnnnnnnnnnnnnnnnnnnnnnnnnnnnnnnnnnnnnnnnnnnnnnnnnnnnnnnnnnnnnnnnnnnnnnnnnnnnnnnnnnnnnnnnnnnnnnnnnnnnnnnnnnnnnnnnnnnnnnnnnnnnnnnnnnnnnnnnnnnnnnnnnnnnnnnnnnnnnnnnnnnnnnnnnnnnnnnnnnnnnnnnnnnnnnnnnnnnnnnnnnnnnnnnnnnnnnnnnnnnnnnnnnnnnnnnnnnnnnnnnnnnnnnnnnnnnnnnnnnnnnnnnnnnnnnnnnnnnnnnnnnnnnnnnnnnnnnnnnnnnnnnnnnnnnnnnnnnnnnnnnnnnnnnnnnnnnnnnnnnnnnnnnnnnnnnnnnnnnnnnnnnnnnnnnnnnnnnnnnnnnnnnnnnnnnnnnnnnnnnnnnnnnnnnnnnnnnnnnnnnnnnnnnnnnnnnnnnnnnnnnnnnnnnnnnnnnnnnnnnnnnnnnnnnnnnnnnnnnnnnnnnnnnnnnnnnnnnnnnnnnnnnnnnnnnnnnnnnnnnnnnnnnnnnnnnnnnnnnnnnnnnnnnnnnnnnnnnnnnnnnnnnnnnnnnnnnnnnnnnnnnnnnnnnnnnnnnnnnnnnnnnnnnnnnnnnnnnnnnnnnnnnnnnnnnnnnnnnnnnnnnnnnnnnnnnnnnnnnnnnnnnnnnnnnnnnnnnnnnnnnnnnnnnnnnnnnnnnnnnnnnnnnnnnnnnnnnnnnnnnnnnnnnnnnnnnnnnnnnnnnnnnnnnnnnnnnnnnnnnnnnnnnnnnnnnnnnnnnnnnnnnnnnnnnnnnnnnnnnnnnnnnnnnnnnnnnnnnnnnnnnnnnnnnnnnnnnnnnnnnnnnnnnnnnnnnnnnnnnnnnnnnnnnnnnnnnnnnnnnnnnnnnnnnnnnnnnnnnnnnnnnnnnnnnnnnnnnnnnnnnnnnnnnnnnnnnnnnnnnnnnnnnnnnnnnnnnnnnnnnnnnnnnnnnnnnnnnnnnnnnnnnnnnnnnnnnnnnnnnnnnnnnnnnnnnnnnnnnnnnnnnnnnnnnnnnnnnnnnnnnnnnnnnnnnnnnnnnnnnnnnnnnnnnnnnnnnnnnnnnnnnnnnnnnnnnnnnnnnnnnnnnnnnnnnnnnnnnnnnnnnnnnnnnnnnnnnnnnnnnnnnnnnnnnnnnnnnnnnnnnnnnnnnnnnnnnnnnnnnnnnnnnnnnnnnnnnnnnnnnnnnnnnnnnnnnnnnnnnnnnnnnnnnnnnnnnnnnnnnnnnnnnnnnnnnnnnnnnnnnnnnnnnnnnnnnnnnnnnnnnnnnnnnnnnnnnnnnnnnnnnnnnnnnnnnnnnnnnnnnnnnnnnnnnnnnnnnnnnnnnnnnnnnnnnnnnnnnnnnnnnnnnnnnnnnnnnnnnnnnnnnnnnnnnnnnnnnnnnnnnnnnnnnnnnnnnnnnnnnnnnnnnnnnnnnnnnnnnnnnnnnnnnnnnnnnnnnnnnnnnnnnnnnnnnnnnnnnnnnnnnnnnnnnnnnnnnnnnnnnnnnnnnnnnnnnnnnnnnnnnnnnnnnnnnnnnnnnnnnnnnnnnnnnnnnnnnnnnnnnnnnnnnnnnnnnnnnnnnnnnnnnnnnnnnnnnnnnnnnnnnnnnnnnnnnnnnnnnnnnnnnnnnnnnnnnnnnnnnnnnnnnnnnnnnnnnnnnnnnnnnnnnnnnnnnnnnnnnnnnnnnnnnnnnnnnnnnnnnnnnnnnnnnnnnnnnnnnnnnnnnnnnnnnnnnnnnnnnnnnnnnnnnnnnnnnnnnnnnnnnnnnnnnnnnnnnnnnnnnnnnnnnnnnnnnnnnnnnnnnnnnnnnnnnnnnnnnnnnnnnnnnnnnnnnnnnnnnnnnnnnnnnnnnnnnnnnnnnnnnnnnnnnnnnnnnnnnnnnnnnnnnnnnnnnnnnnnnnnnnnnnnnnnnnnnnnnnnnnnnnnnnnnnnnnnnnnnnnnnnnnnnnnnnnnnnnnnnnnnnnnnnnnnnnnnnnnnnnnnnnnnnnnnnnnnnnnnnnnnnnnnnnnnnnnnnnnnnnnnnnnnnnnnnnnnnnnnnnnnnnnnnnnnnnnnnnnnnnnnnnnnnnnnnnnnnnnnnnnnnnnnnnnnnnnnnnnnnnnnnnnnnnnnnnnnnnnnnnnnnnnnnnnnnnnnnnnnnnnnnnnnnnnnnnnnnnnnnnnnnnnnnnnnnnnnnnnnnnnnnnnnnnnnnnnnnnnnnnnnnnnnnnnnnnnnnnnnnnnnnnnnnnnnnnnnnnnnnnnnnnnnnnnnnnnnnnnnnnnnnnnnnnnnnnnnnnnnnnnnnnnnnnnnnnnnnnnnnnnnnnnnnnnnnnnnnnnnnnnnnnnnnnnnnnnnnnnnnnnnnnnnnnnnnnnnnnnnnnnnnnnnnnnnnnnnnnnnnnnnnnnnnnnnnnnnnnnnnnnnnnnnnnnnnnnnnnnnnnnnnnnnnnnnnnnnnnnnnnnnnnnnnnnnnnnnnnnnnnnnnnnnnnnnnnnnnnnnnnnnnnnnnnnnnnnnnnnnnnnnnnnnnnnnnnnnnnnnnnnnnnnnnnnnnnnnnnnnnnnnnnnnnnnnnnnnnnnnnnnnnnnnnnnnnnnnnnnnnnnnnnnnnnnnnnnnnnnnnnnnnnnnnnnnnnnnnnnnnnnnnnnnnnnnnnnnnnnnnnnnnnnnnnnnnnnnnnnnnnnnnnnnnnnnnnnnnnnnnnnnnnnnnnnnnnnnnnnnnnnnnnnnnnnnnnnnnnnnnnnnnnnnnnnnnnnnnnnnnnnnnnnnnnnnnnnnnnnnnnnnnnnnnnnnnnnnnnnnnnnnnnnnnnnnnnnnnnnnnnnnnnnnnnnnnnnnnnnnnnnnnnnnnnnnnnnnnnnnnnnnnnnnnnnnnnnnnnnnnnnnnnnnnnnnnnnnnnnnnnnnnnnnnnnnnnnnnnnnnnnnnnnnnnnnnnnnnnnnnnnnnnnnnnnnnnnnnnnnnnnnnnnnnnnnnnnnnnnnnnnnnnnnnnnnnnnnnnnnnnnnnnnnnnnnnnnnnnnnnnnnnnnnnnnnnnnnnnnnnnnnnnnnnnnnnnnnnnnnnnnnnnnnnnnnnnnnnnnnnnnnnnnnnnnnnnnnnnnnnnnnnnnnnnnnnnnnnnnnnnnnnnnnnnnnnnnnnnnnnnnnnnnnnnnnnnnnnnnnnnnnnnnnnnnnnnnnnnnnnnnnnnnnnnnnnnnnnnnnnnnnnnnnnnnnnnnnnnnnnnnnnnnnnnnnnnnnnnnnnnnnnnnnnnnnnnnnnnnnnnnnnnnnnnnnnnnnnnnnnnnnnnnnnnnnnnnnnnnnnnnnnnnnnnnnnnnnnnnnnnnnnnnnnnnnnnnnnnnnnnnnnnnnnnnnnnnnnnnnnnnnnnnnnnnnnnnnnnnnnnnnnnnnnnnnnnnnnnnnnnnnnnnnnnnnnnnnnnnnnnnnnnnnnnnnnnnnnnnnnnnnnnnnnnnnnnnnnnnnnnnnnnnnnnnnnnnnnnnnnnnnnnnnnnnnnnnnnnnnnnnnnnnnnnnnnnnnnnnnnnnnnnnnnnnnnnnnnnnnnnnnnnnnnnnnnnnnnnnnnnnnnnnnnnnnnnnnnnnnnnnnnnnnnnnnnnnnnnnnnnnnnnnnnnnnnnnnnnnnnnnnnnnnnnnnnnnnnnnnnnnnnnnnnnnnnnnnnnnnnnnnnnnnnnnnnnnnnnnnnnnnnnnnnnnnnnnnnnnnnnnnnnnnnnnnnnnnnnnnnnnnnnnnnnnnnnnnnnnnnnnnnnnnnnnnnnnnnnnnnnnnnnnnnnnnnnnnnnnnnnnnnnnnnnnnnnnnnnnnnnnnnnnnnnnnnnnnnnnnnnnnnnnnnnnnnnnnnnnnnnnnnnnnnnnnnnnnnnnnnnnnnnnnnnnnnnnnnnnnnnnnnnnnnnnnnnnnnnnnnnnnnnnnnnnnnnnnnnnnnnnnnnnnnnnnnnnnnnnnnnnnnnnnnnnnnnnnnnnnnnnnnnnnnnnnnnnnnnnnnnnnnnnnnnnnnnnnnnnnnnnnnnnnnnnnnnnnnnnnnnnnnnnnnnnnnnnnnnnnnnnnnnnnnnnnnnnnnnnnnnnnnnnnnnnnnnnnnnnnnnnnnnnnnnnnnnnnnnnnnnnnnnnnnnnnnnnnnnnnnnnnnnnnnnnnnnnnnnnnnnnnnnnnnnnnnnnnnnnnnnnnnnnnnnnnnnnnnnnnnnnnnnnnnnnnnnnnnnnnnnnnnnnnnnnnnnnnnnnnnnnnnnnnnnnnnnnnnnnnnnnnnnnnnnnnnnnnnnnnnnnnnnnnnnnnnnnnnnnnnnnnnnnnnnnnnnnnnnnnnnnnnnnnnnnnnnnnnnnnnnnnnnnnnnnnnnnnnnnnnnnnnnnnnnnnnnnnnnnnnnnnnnnnnnnnnnnnnnnnnnnnnnnnnnnnnnnnnnnnnnnnnnnnnnnnnnnnnnnnnnnnnnnnnnnnnnnnnnnnnnnnnnnnnnnnnnnnnnnnnnnnnnnnnnnnnnnnnnnnnnnnnnnnnnnnnnnnnnnnnnnnnnnnnnnnnnnnnnnnnnnnnnnnnnnnnnnnnnnnnnnnnnnnnnnnnnnnnnnnnnnnnnnnnnnnnnnnnnnnnnnnnnnnnnnnnnnnnnnnnnnnnnnnnnnnnnnnnnnnnnnnnnnnnnnnnnnnnnnnnnnnnnnnnnnnnnnnnnnnnnnnnnnnnnnnnnnnnnnnnnnnnnnnnnnnnnnnnnnnnnnnnnnnnnnnnnnnnnnnnnnnnnnnnnnnnnnnnnnnnnnnnnnnnnnnnnnnnnnnnnnnnnnnnnnnnnnnnnnnnnnnnnnnnnnnnnnnnnnnnnnnnnnnnnnnnnnnnnnnnnnnnnnnnnnnnnnnnnnnnnnnnnnnnnnnnnnnnnnnnnnnnnnnnnnnnnnnnnnnnnnnnnnnnnnnnnnnnnnnnnnnnnnnnnnnnnnnnnnnnnnnnnnnnnnnnnnnnnnnnnnnnnnnnnnnnnnnnnnnnnnnnnnnnnnnnnnnnnnnnnnnnnnnnnnnnnnnnnnnnnnnnnnnnnnnnnnnnnnnnnnnnnnnnnnnnnnnnnnnnnnnnnnnnnnnnnnnnnnnnnnnnnnnnnnnnnnnnnnnnnnnnnnnnnnnnnnnnnnnnnnnnnnnnnnnnnnnnnnnnnnnnnnnnnnnnnnnnnnnnnnnnnnnnnnnnnnnnnnnnnnnnnnnnnnnnnnnnnnnnnnnnnnnnnnnnnnnnnnnnnnnnnnnnnnnnnnnnnnnnnnnnnnnnnnnnnnnnnnnnnnnnnnnnnnnnnnnnnnnnnnnnnnnnnnnnnnnnnnnnnnnnnnnnnnnnnnnnnnnnnnnnnnnnnnnnnnnnnnnnnnnnnnnnnnnnnnnnnnnnnnnnnnnnnnnnnnnnnnnnnnnnnnnnnnnnnnnnnnnnnnnnnnnnnnnnnnnnnnnnnnnnnnnnnnnnnnnnnnnnnnnnnnnnnnnnnnnnnnnnnnnnnnnnnnnnnnnnnnnnnnnnnnnnnnnnnnnnnnnnnnnnnnnnnnnnnnnnnnnnnnnnnnnnnnnnnnnnnnnnnnnnnnnnnnnnnnnnnnnnnnnnnnnnnnnnnnnnnnnnnnnnnnnnnnnnnnnnnnnnnnnnnnnnnnnnnnnnnnnnnnnnnnnnnnnnnnnnnnnnnnnnnnnnnnnnnnnnnnnnnnnnnnnnnnnnnnnnnnnnnnnnnnnnnnnnnnnnnnnnnnnnnnnnnnnnnnnnnnnnnnnnnnnnnnnnnnnnnnnnnnnnnnnnnnnnnnnnnnnnnnnnnnnnnnnnnnnnnnnnnnnnnnnnnnnnnnnnnnnnnnnnnnnnnnnnnnnnnnnnnnnnnnnnnnnnnnnnnnnnnnnnnnnnnnnnnnnnnnnnnnnnnnnnnnnnnnnnnnnnnnnnnnnnnnnnnnnnnnnnnnnnnnnnnnnnnnnnnnnnnnnnnnnnnnnnnnnnnnnnnnnnnnnnnnnnnnnnnnnnnnnnnnnnnnnnnnnnnnnnnnnnnnnnnnnnnnnnnnnnnnnnnnnnnnnnnnnnnnnnnnnnnnnnnnnnnnnnnnnnnnnnnnnnnnnnnnnnnnnnnnnnnnnnnnnnnnnnnnnnnnnnnnnnnnnnnnnnnnnnnnnnnnnnnnnnnnnnnnnnnnnnnnnnnnnnnnnnnnnnnnnnnnnnnnnnnnnnnnnnnnnnnnnnnnnnnnnnnnnnnnnnnnnnnnnnnnnnnnnnnnnnnnnnnnnnnnnnnnnnnnnnnnnnnnnnnnnnnnnnnnnnnnnnnnnnnnnnnnnnnnnnnnnnnnnnnnnnnnnnnnnnnnnnnnnnnnnnnnnnnnnnnnnnnnnnnnnnnnnnnnnnnnnnnnnnnnnnnnnnnnnnnnnnnnnnnnnnnnnnnnnnnnnnnnnnnnnnnnnnnnnnnnnnnnnnnnnnnnnnnnnnnnnnnnnnnnnnnnnnnnnnnnnnnnnnnnnnnnnnnnnnnnnnnnnnnnnnnnnnnnnnnnnnnnnnnnnnnnnnnnnnnnnnnnnnnnnnnnnnnnnnnnnnnnnnnnnnnnnnnnnnnnnnnnnnnnnnnnnnnnnnnnnnnnnnnnnnnnnnnnnnnnnnnnnnnnnnnnnnnnnnnnnnnnnnnnnnnnnnnnnnnnnnnnnnnnnnnnnnnnnnnnnnnnnnnnnnnnnnnnnnnnnnnnnnnnnnnnnnnnnnnnnnnnnnnnnnnnnnnnnnnnnnnnnnnnnnnnnnnnnnnnnnnnnnnnnnnnnnnnnnnnnnnnnnnnnnnnnnnnnnnnnnnnnnnnnnnnnnnnnnnnnnnnnnnnnnnnnnnnnnnnnnnnnnnnnnnnnnnnnnnnnnnnnnnnnnnnnnnnnnnnnnnnnnnnnnnnnnnnnnnnnnnnnnnnnnnnnnnnnnnnnnnnnnnnnnnnnnnnnnnnnnnnnnnnnnnnnnnnnnnnnnnnnnnnnnnnnnnnnnnnnnnnnnnnnnnnnnnnnnnnnnnnnnnnnnnnnnnnnnnnnnnnnnnnnnnnnnnnnnnnnnnnnnnnnnnnnnnnnnnnnnnnnnnnnnnnnnnnnnnnnnnnnnnnnnnnnnnnnnnnnnnnnnnnnnnnnnnnnnnnnnnnnnnnnnnnnnnnnnnnnnnnnnnnnnnnnnnnnnnnnnnnnnnnnnnnnnnnnnnnnnnnnnnnnnnnnnnnnnnnnnnnnnnnnnnnnnnnnnnnnnnnnnnnnnnnnnnnnnnnnnnnnnnnnnnnnnnnnnnnnnnnnnnnnnnnnnnnnnnnnnnnnnnnnnnnnnnnnnnnnnnnnnnnnnnnnnnnnnnnnnnnnnnnnnnnnnnnnnnnnnnnnnnnnnnnnnnnnnnnnnnnnnnnnnnnnnnnnnnnnnnnnnnnnnnnnnnnnnnnnnnnnnnnnnnnnnnnnnnnnnnnnnnnnnnnnnnnnnnnnnnnnnnnnnnnnnnnnnnnnnnnnnnnnnnnnnnnnnnnnnnnnnnnnnnnnnnnnnnnnnnnnnnnnnnnnnnnnnnnnnnnnnnnnnnnnnnnnnnnnnnnnnnnnnnnnnnnnnnnnnnnnnnnnnnnnnnnnnnnnnnnnnnnnnnnnnnnnnnnnnnnnnnnnnnnnnnnnnnnnnnnnnnnnnnnnnnnnnnnnnnnnnnnnnnnnnnnnnnnnnnnnnnnnnnnnnnnnnnnnnnnnnnnnnnnnnnnnnnnnnnnnnnnnnnnnnnnnnnnnnnnnnnnnnnnnnnnnnnnnnnnnnnnnnnnnnnnnnnnnnnnnnnnnnnnnnnnnnnnnnnnnnnnnnnnnnnnnnnnnnnnnnnnnnnnnnnnnnnnnnnnnnnnnnnnnnnnnnnnnnnnnnnnnnnnnnnnnnnnnnnnnnnnnnnnnnnnnnnnnnnnnnnnnnnnnnnnnnnnnnnnnnnnnnnnnnnnnnnnnnnnnnnnnnnnnnnnnnnnnnnnnnnnnnnnnnnnnnnnnnnnnnnnnnnnnnnnnnnnnnnnnnnnnnnnnnnnnnnnnnnnnnnnnnnnnnnnnnnnnnnnnnnnnnnnnnnnnnnnnnnnnnnnnnnnnnnnnnnnnnnnnnnnnnnnnnnnnnnnnnnnnnnnnnnnnnnnnnnnnnnnnnnnnnnnnnnnnnnnnnnnnnnnnnnnnnnnnnnnnnnnnnnnnnnnnnnnnnnnnnnnnnnnnnnnnnnnnnnnnnnnnnnnnnnnnnnnnnnnnnnnnnnnnnnnnnnnnnnnnnnnnnnnnnnnnnnnnnnnnnnnnnnnnnnnnnnnnnnnnnnnnnnnnnnnnnnnnnnnnnnnnnnnnnnnnnnnnnnnnnnnnnnnnnnnnnnnnnnnnnnnnnnnnnnnnnnnnnnnnnnnnnnnnnnnnnnnnnnnnnnnnnnnnnnnnnnnnnnnnnnnnnnnnnnnnnnnnnnnnnnnnnnnnnnnnnnnnnnnnnnnnnnnnnnnnnnnnnnnnnnnnnnnnnnnnnnnnnnnnnnnnnnnnnnnnnnnnnnnnnnnnnnnnnnnnnnnnnnnnnnnnnnnnnnnnnnnnnnnnnnnnnnnnnnnnnnnnnnnnnnnnnnnnnnnnnnnnnnnnnnnnnnnnnnnnnnnnnnnnnnnnnnnnnnnnnnnnnnnnnnnnnnnnnnnnnnnnnnnnnnnnnnnnnnnnnnnnnnnnnnnnnnnnnnnnnnnnnnnnnnnnnnnnnnnnnnnnnnnnnnnnnnnnnnnnnnnnnnnnnnnnnnnnnnnnnnnnnnnnnnnnnnnnnnnnnnnnnnnnnnnnnnnnnnnnnnnnnnnnnnnnnnnnnnnnnnnnnnnnnnnnnnnnnnnnnnnnnnnnnnnnnnnnnnnnnnnnnnnnnnnnnnnnnnnnnnnnnnnnnnnnnnnnnnnnnnnnnnnnnnnnnnnnnnnnnnnnnnnnnnnnnnnnnnnnnnnnnnnnnnnnnnnnnnnnnnnnnnnnnnnnnnnnnnnnnnnnnnnnnnnnnnnnnnnnnnnnnnnnnnnnnnnnnnnnnnnnnnnnnnnnnnnnnnnnnnnnnnnnnnnnnnnnnnnnnnnnnnnnnnnnnnnnnnnnnnnnnnnnnnnnnnnnnnnnnnnnnnnnnnnnnnnnnnnnnnnnnnnnnnnnnnnnnnnnnnnnnnnnnnnnnnnnnnnnnnnnnnnnnnnnnnnnnnnnnnnnnnnnnnnnnnnnnnnnnnnnnnnnnnnnnnnnnnnnnnnnnnnnnnnnnnnnnnnnnnnnnnnnnnnnnnnnnnnnnnnnnnnnnnnnnnnnnnnnnnnnnnnnnnnnnnnnnnnnnnnnnnnnnnnnnnnnnnnnnnnnnnnnnnnnnnnnnnnnnnnnnnnnnnnnnnnnnnnnnnnnnnnnnnnnnnnnnnnnnnnnnnnnnnnnnnnnnnnnnnnnnnnnnnnnnnnnnnnnnnnnnnnnnnnnnnnnnnnnnnnnnnnnnnnnnnnnnnnnnnnnnnnnnnnnnnnnnnnnnnnnnnnnnnnnnnnnnnnnnnnnnnnnnnnnnnnnnnnnnnnnnnnnnnnnnnnnnnnnnnnnnnnnnnnnnnnnnnnnnnnnnnnnnnnnnnnnnnnnnnnnnnnnnnnnnnnnnnnnnnnnnnnnnnnnnnnnnnnnnnnnnnnnnnnnnnnnnnnnnnnnnnnnnnnnnnnnnnnnnnnnnnnnnnnnnnnnnnnnnnnnnnnnnnnnnnnnnnnnnnnnnnnnnnnnnnnnnnnnnnnnnnnnnnnnnnnnnnnnnnnnnnnnnnnnnnnnnnnnnnnnnnnnnnnnnnnnnnnnnnnnnnnnnnnnnnnnnnnnnnnnnnnnnnnnnnnnnnnnnnnnnnnnnnnnnnnnnnnnnnnnnnnnnnnnnnnnnnnnnnnnnnnnnnnnnnnnnnnnnnnnnnnnnnnnnnnnnnnnnnnnnnnnnnnnnnnnnnnnnnnnnnnnnnnnnnnnnnnnnnnnnnnnnnnnnnnnnnnnnnnnnnnnnnnnnnnnnnnnnnnnnnnnnnnnnnnnnnnnnnnnnnnnnnnnnnnnnnnnnnnnnnnnnnnnnnnnnnnnnnnnnnnnnnnnnnnnnnnnnnnnnnnnnnnnnnnnnnnnnnnnnnnnnnnnnnnnnnnnnnnnnnnnnnnnnnnnnnnnnnnnnnnnnnnnnnnnnnnnnnnnnnnnnnnnnnnnnnnnnnnnnnnnnnnnnnnnnnnnnnnnnnnnnnnnnnnnnnnnnnnnnnnnnnnnnnnnnnnnnnnnnnnnnnnnnnnnnnnnnnnnnnnnnnnnnnnnnnnnnnnnnnnnnnnnnnnnnnnnnnnnnnnnnnnnnnnnnnnnnnnnnnnnnnnnnnnnnnnnnnnnnnnnnnnnnnnnnnnnnnnnnnnnnnnnnnnnnnnnnnnnnnnnnnnnnnnnnnnnnnnnnnnnnnnnnnnnnnnnnnnnnnnnnnnnnnnnnnnnnnnnnnnnnnnnnnnnnnnnnnnnnnnnnnnnnnnnnnnnnnnnnnnnnnnnnnnnnnnnnnnnnnnnnnnnnnnnnnnnnnnnnnnnnnnnnnnnnnnnnnnnnnnnnnnnnnnnnnnnnnnnnnnnnnnnnnnnnnnnnnnnnnnnnnnnnnnnnnnnnnnnnnnnnnnnnnnnnnnnnnnnnnnnnnnnnnnnnnnnnnnnnnnnnnnnnnnnnnnnnnnnnnnnnnnnnnnnnnnnnnnnnnnnnnnnnnnnnnnnnnnnnnnnnnnnnnnnnnnnnnnnnnnnnnnnnnnnnnnnnnnnnnnnnnnnnnnnnnnnnnnnnnnnnnnnnnnnnnnnnnnnnnnnnnnnnnnnnnnnnnnnnnnnnnnnnnnnnnnnnnnnnnnnnnnnnnnnnnnnnnnnnnnnnnnnnnnnnnnnnnnnnnnnnnnnnnnnnnnnnnnnnnnnnnnnnnnnnnnnnnnnnnnnnnnnnnnnnnnnnnnnnnnnnnnnnnnnnnnnnnnnnnnnnnnnnnnnnnnnnnnnnnnnnnnnnnnnnnnnnnnnnnnnnnnnnnnnnnnnnnnnnnnnnnnnnnnnnnnnnnnnnnnnnnnnnnnnnnnnnnnnnnnnnnnnnnnnnnnnnnnnnnnnnnnnnnnnnnnnnnnnnnnnnnnnnnnnnnnnnnnnnnnnnnnnnnnnnnnnnnnnnnnnnnnnnnnnnnnnnnnnnnnnnnnnnnnnnnnnnnnnnnnnnnnnnnnnnnnnnnnnnnnnnnnnnnnnnnnnnnnnnnnnnnnnnnnnnnnnnnnnnnnnnnnnnnnnnnnnnnnnnnnnnnnnnnnnnnnnnnnnnnnnnnnnnnnnnnnnnnnnnnnnnnnnnnnnnnnnnnnnnnnnnnnnnnnnnnnnnnnnnnnnnnnnnnnnnnnnnnnnnnnnnnnnnnnnnnnnnnnnnnnnnnnnnnnnnnnnnnnnnnnnnnnnnnnnnnnnnnnnnnnnnnnnnnnnnnnnnnnnnnnnnnnnnnnnnnnnnnnnnnnnnnnnnnnnnnnnnnnnnnnnnnnnnnnnnnnnnnnnnnnnnnnnnnnnnnnnnnnnnnnnnnnnnnnnnnnnnnnnnnnnnnnnnnnnnnnnnnnnnnnnnnnnnnnnnnnnnnnnnnnnnnnnnnnnnnnnnnnnnnnnnnnnnnnnnnnnnnnnnnnnnnnnnnnnnnnnnnnnnnnnnnnnnnnnnnnnnnnnnnnnnnnnnnnnnnnnnnnnnnnnnnnnnnnnnnnnnnnnnnnnnnnnnnnnnnnnnnnnnnnnnnnnnnnnnnnnnnnnnnnnnnnnnnnnnnnnnnnnnnnnnnnnnnnnnnnnnnnnnnnnnnnnnnnnnnnnnnnnnnnnnnnnnnnnnnnnnnnnnnnnnnnnnnnnnnnnnnnnnnnnnnnnnnnnnnnnnnnnnnnnnnnnnnnnnnnnnnnnnnnnnnnnnnnnnnnnnnnnnnnnnnnnnnnnnnnnnnnnnnnnnnnnnnnnnnnnnnnnnnnnnnnnnnnnnnnnnnnnnnnnnnnnnnnnnnnnnnnnnnnnnnnnnnnnnnnnnnnnnnnnnnnnnnnnnnnnnnnnnnnnnnnnnnnnnnnnnnnnnnnnnnnnnnnnnnnnnnnnnnnnnnnnnnnnnnnnnnnnnnnnnnnnnnnnnnnnnnnnnnnnnnnnnnnnnnnnnnnnnnnnnnnnnnnnnnnnnnnnnnnnnnnnnnnnnnnnnnnnnnnnnnnnnnnnnnnnnnnnnnnnnnnnnnnnnnnnnnnnnnnnnnnnnnnnnnnnnnnnnnnnnnnnnnnnnnnnnnnnnnnnnnnnnnnnnnnnnnnnnnnnnnnnnnnnnnnnnnnnnnnnnnnnnnnnnnnnnnnnnnnnnnnnnnnnnnnnnnnnnnnnnnnnnnnnnnnnnnnnnnnnnnnnnnnnnnnnnnnnnnnnnnnnnnnnnnnnnnnnnnnnnnnnnnnnnnnnnnnnnnnnnnnnnnnnnnnnnnnnnnnnnnnnnnnnnnnnnnnnnnnnnnnnnnnnnnnnnnnnnnnnnnnnnnnnnnnnnnnnnnnnnnnnnnnnnnnnnnnnnnnnnnnnnnnnnnnnnnnnnnnnnnnnnnnnnnnnnnnnnnnnnnnnnnnnnnnnnnnnnnnnnnnnnnnnnnnnnnnnnnnnnnnnnnnnnnnnnnnnnnnnnnnnnnnnnnnnnnnnnnnnnnnnnnnnnnnnnnnnnnnnnnnnnnnnnnnnnnnnnnnnnnnnnnnnnnnnnnnnnnnnnnnnnnnnnnnnnnnnnnnnnnnnnnnnnnnnnnnnnnnnnnnnnnnnnnnnnnnnnnnnnnnnnnnnnnnnnnnnnnnnnnnnnnnnnnnnnnnnnnnnnnnnnnnnnnnnnnnnnnnnnnnnnnnnnnnnnnnnnnnnnnnnnnnnnnnnnnnnnnnnnnnnnnnnnnnnnnnnnnnnnnnnnnnnnnnnnnnnnnnnnnnnnnnnnnnnnnnnnnnnnnnnnnnnnnnnnnnnnnnnnnnnnnnnnnnnnnnnnnnnnnnnnnnnnnnnnnnnnnnnnnnnnnnnnnnnnnnnnnnnnnnnnnnnnnnnnnnnnnnnnnnnnnnnnnnnnnnnnnnnnnnnnnnnnnnnnnnnnnnnnnnnnnnnnnnnnnnnnnnnnnnnnnnnnnnnnnnnnnnnnnnnnnnnnnnnnnnnnnnnnnnnnnnnnnnnnnnnnnnnnnnnnnnnnnnnnnnnnnnnnnnnnnnnnnnnnnnnnnnnnnnnnnnnnnnnnnnnnnnnnnnnnnnnnnnnnnnnnnnnnnnnnnnnnnnnnnnnnnnnnnnnnnnnnnnnnnnnnnnnnnnnnnnnnnnnnnnnnnnnnnnnnnnnnnnnnnnnnnnnnnnnnnnnnnnnnnnnnnnnnnnnnnnnnnnnnnnnnnnnnnnnnnnnnnnnnnnnnnnnnnnnnnnnnnnnnnnnnnnnnnnnnnnnnnnnnnnnnnnnnnnnnnnnnnnnnnnnnnnnnnnnnnnnnnnnnnnnnnnnnnnnnnnnnnnnnnnnnnnnnnnnnnnnnnnnnnnnnnnnnnnnnnnnnnnnnnnnnnnnnnnnnnnnnnnnnnnnnnnnnnnnnnnnnnnnnnnnnnnnnnnnnnnnnnnnnnnnnnnnnnnnnnnnnnnnnnnnnnnnnnnnnnnnnnnnnnnnnnnnnnnnnnnnnnnnnnnnnnnnnnnnnnnnnnnnnnnnnnnnnnnnnnnnnnnnnnnnnnnnnnnnnnnnnnnnnnnnnnnnnnnnnnnnnnnnnnnnnnnnnnnnnnnnnnnnnnnnnnnnnnnnnnnnnnnnnnnnnnnnnnnnnnnnnnnnnnnnnnnnnnnnnnnnnnnnnnnnnnnnnnnnnnnnnnnnnnnnnnnnnnnnnnnnnnnnnnnnnnnnnnnnnnnnnnnnnnnnnnnnnnnnnnnnnnnnnnnnnnnnnnnnnnnnnnnnnnnnnnnnnnnnnnnnnnnnnnnnnnnnnnnnnnnnnnnnnnnnnnnnnnnnnnnnnnnnnnnnnnnnnnnnnnnnnnnnnnnnnnnnnnnnnnnnnnnnnnnnnnnnnnnnnnnnnnnnnnnnnnnnnnnnnnnnnnnnnnnnnnnnnnnnnnnnnnnnnnnnnnnnnnnnnnnnnnnnnnnnnnnnnnnnnnnnnnnnnnnnnnnnnnnnnnnnnnnnnnnnnnnnnnnnnnnnnnnnnnnnnnnnnnnnnnnnnnnnnnnnnnnnnnnnnnnnnnnnnnnnnnnnnnnnnnnnnnnnnnnnnnnnnnnnnnnnnnnnnnnnnnnnnnnnnnnnnnnnnnnnnnnnnnnnnnnnnnnnnnnnnnnnnnnnnnnnnnnnnnnnnnnnnnnnnnnnnnnnnnnnnnnnnnnnnnnnnnnnnnnnnnnnnnnnnnnnnnnnnnnnnnnnnnnnnnnnnnnnnnnnnnnnnnnnnnnnnnnnnnnnnnnnnnnnnnnnnnnnnnnnnnnnnnnnnnnnnnnnnnnnnnnnnnnnnnnnnnnnnnnnnnnnnnnnnnnnnnnnnnnnnnnnnnnnnnnnnnnnnnnnnnnnnnnnnnnnnnnnnnnnnnnnnnnnnnnnnnnnnnnnnnnnnnnnnnnnnnnnnnnnnnnnnnnnnnnnnnnnnnnnnnnnnnnnnnnnnnnnnnnnnnnnnnnnnnnnnnnnnnnnnnnnnnnnnnnnnnnnnnnnnnnnnnnnnnnnnnnnnnnnnnnnnnnnnnnnnnnnnnnnnnnnnnnnnnnnnnnnnnnnnnnnnnnnnnnnnnnnnnnnnnnnnnnnnnnnnnnnnnnnnnnnnnnnnnnnnnnnnnnnnnnnnnnnnnnnnnnnnnnnnnnnnnnnnnnnnnnnnnnnnnnnnnnnnnnnnnnnnnnnnnnnnnnnnnnnnnnnnnnnnnnnnnnnnnnnnnnnnnnnnnnnnnnnnnnnnnnnnnnnnnnnnnnnnnnnnnnnnnnnnnnnnnnnnnnnnnnnnnnnnnnnnnnnnnnnnnnnnnnnnnnnnnnnnnnnnnnnnnnnnnnnnnnnnnnnnnnnnnnnnnnnnnnnnnnnnnnnnnnnnnnnnnnnnnnnnnnnnnnnnnnnnnnnnnnnnnnnnnnnnnnnnnnnnnnnnnnnnnnnnnnnnnnnnnnnnnnnnnnnnnnnnnnnnnnnnnnnnnnnnnnnnnnnnnnnnnnnnnnnnnnnnnnnnnnnnnnnnnnnnnnnnnnnnnnnnnnnnnnnnnnnnnnnnnnnnnnnnnnnnnnnnnnnnnnnnnnnnnnnnnnnnnnnnnnnnnnnnnnnnnnnnnnnnnnnnnnnnnnnnnnnnnnnnnnnnnnnnnnnnnnnnnnnnnnnnnnnnnnnnnnnnnnnnnnnnnnnnnnnnnnnnnnnnnnnnnnnnnnnnnnnnnnnnnnnnnnnnnnnnnnnnnnnnnnnnnnnnnnnnnnnnnnnnnnnnnnnnnnnnnnnnnnnnnnnnnnnnnnnnnnnnnnnnnnnnnnnnnnnnnnnnnnnnnnnnnnnnnnnnnnnnnnnnnnnnnnnnnnnnnnnnnnnnnnnnnnnnnnnnnnnnnnnnnnnnnnnnnnnnnnnnnnnnnnnnnnnnnnnnnnnnnnnnnnnnnnnnnnnnnnnnnnnnnnnnnnnnnnnnnnnnnnnnnnnnnnnnnnnnnnnnnnnnnnnnnnnnnnnnnnnnnnnnnnnnnnnnnnnnnnnnnnnnnnnnnnnnnnnnnnnnnnnnnnnnnnnnnnnnnnnnnnnnnnnnnnnnnnnnnnnnnnnnnnnnnnnnnnnnnnnnnnnnnnnnnnnnnnnnnnnnnnnnnnnnnnnnnnnnnnnnnnnnnnnnnnnnnnnnnnnnnnnnnnnnnnnnnnnnnnnnnnnnnnnnnnnnnnnnnnnnnnnnnnnnnnnnnnnnnnnnnnnnnnnnnnnnnnnnnnnnnnnnnnnnnnnnnnnnnnnnnnnnnnnnnnnnnnnnnnnnnnnnnnnnnnnnnnnnnnnnnnnnnnnnnnnnnnnnnnnnnnnnnnnnnnnnnnnnnnnnnnnnnnnnnnnnnnnnnnnnnnnnnnnnnnnnnnnnnnnnnnnnnnnnnnnnnnnnnnnnnnnnnnnnnnnnnnnnnnnnnnnnnnnnnnnnnnnnnnnnnnnnnnnnnnnnnnnnnnnnnnnnnnnnnnnnnnnnnnnnnnnnnnnnnnnnnnnnnnnnnnnnnnnnnnnnnnnnnnnnnnnnnnnnnnnnnnnnnnnnnnnnnnnnnnnnnnnnnnnnnnnnnnnnnnnnnnnnnnnnnnnnnnnnnnnnnnnnnnnnnnnnnnnnnnnnnnnnnnnnnnnnnnnnnnnnnnnnnnnnnnnnnnnnnnnnnnnnnnnnnnnnnnnnnnnnnnnnnnnnnnnnnnnnnnnnnnnnnnnnnnnnnnnnnnnnnnnnnnnnnnnnnnnnnnnnnnnnnnnnnnnnnnnnnnnnnnnnnnnnnnnnnnnnnnnnnnnnnnnnnnnnnnnnnnnnnnnnnnnnnnnnnnnnnnnnnnnnnnnnnnnnnnnnnnnnnnnnnnnnnnnnnnnnnnnnnnnnnnnnnnnnnnnnnnnnnnnnnnnnnnnnnnnnnnnnnnnnnnnnnnnnnnnnnnnnnnnnnnnnnnnnnnnnnnnnnnnnnnnnnnnnnnnnnnnnnnnnnnnnnnnnnnnnnnnnnnnnnnnnnnnnnnnnnnnnnnnnnnnnnnnnnnnnnnnnnnnnnnnnnnnnnnnnnnnnnnnnnnnnnnnnnnnnnnnnnnnnnnnnnnnnnnnnnnnnnnnnnnnnnnnnnnnnnnnnnnnnnnnnnnnnnnnnnnnnnnnnnnnnnnnnnnnnnnnnnnnnnnnnnnnnnnnnnnnnnnnnnnnnnnnnnnnnnnnnnnnnnnnnnnnnnnnnnnnnnnnnnnnnnnnnnnnnnnnnnnnnnnnnnnnnnnnnnnnnnnnnnnnnnnnnnnnnnnnnnnnnnnnnnnnnnnnnnnnnnnnnnnnnnnnnnnnnnnnnnnnnnnnnnnnnnnnnnnnnnnnnnnnnnnnnnnnnnnnnnnnnnnnnnnnnnnnnnnnnnnnnnnnnnnnnnnnnnnnnnnnnnnnnnnnnnnnnnnnnnnnnnnnnnnnnnnnnnnnnnnnnnnnnnnnnnnnnnnnnnnnnnnnnnnnnnnnnnnnnnnnnnnnnnnnnnnnnnnnnnnnnnnnnnnnnnnnnnnnnnnnnnnnnnnnnnnnnnnnnnnnnnnnnnnnnnnnnnnnnnnnnnnnnnnnnnnnnnnnnnnnnnnnnnnnnnnnnnnnnnnnnnnnnnnnnnnnnnnnnnnnnnnnnnnnnnnnnnnnnnnnnnnnnnnnnnnnnnnnnnnnnnnnnnnnnnnnnnnnnnnnnnnnnnnnnnnnnnnnnnnnnnnnnnnnnnnnnnnnnnnnnnnnnnnnnnnnnnnnnnnnnnnnnnnnnnnnnnnnnnnnnnnnnnnnnnnnnnnnnnnnnnnnnnnnnnnnnnnnnnnnnnnnnnnnnnnnnnnnnnnnnnnnnnnnnnnnnnnnnnnnnnnnnnnnnnnnnnnnnnnnnnnnnnnnnnnnnnnnnnnnnnnnnnnnnnnnnnnnnnnnnnnnnnnnnnnnnnnnnnnnnnnnnnnnnnnnnnnnnnnnnnnnnnnnnnnnnnnnnnnnnnnnnnnnnnnnnnnnnnnnnnnnnnnnnnnnnnnnnnnnnnnnnnnnnnnnnnnnnnnnnnnnnnnnnnnnnnnnnnnnnnnnnnnnnnnnnnnnnnnnnnnnnnnnnnnnnnnnnnnnnnnnnnnnnnnnnnnnnnnnnnnnnnnnnnnnnnnnnnnnnnnnnnnnnnnnnnnnnnnnnnnnnnnnnnnnnnnnnnnnnnnnnnnnnnnnnnnnnnnnnnnnnnnnnnnnnnnnnnnnnnnnnnnnnnnnnnnnnnnnnnnnnnnnnnnnnnnnnnnnnnnnnnnnnnnnnnnnnnnnnnnnnnnnnnnnnnnnnnnnnnnnnnnnnnnnnnnnnnnnnnnnnnnnnnnnnnnnnnnnnnnnnnnnnnnnnnnnnnnnnnnnnnnnnnnnnnnnnnnnnnnnnnnnnnnnnnnnnnnnnnnnnnnnnnnnnnnnnnnnnnnnnnnnnnnnnnnnnnnnnnnnnnnnnnnnnnnnnnnnnnnnnnnnnnnnnnnnnnnnnnnnnnnnnnnnnnnnnnnnnnnnnnnnnnnnnnnnnnnnnnnnnnnnnnnnnnnnnnnnnnnnnnnnnnnnnnnnnnnnnnnnnnnnnnnnnnnnnnnnnnnnnnnnnnnnnnnnnnnnnnnnnnnnnnnnnnnnnnnnnnnnnnnnnnnnnnnnnnnnnnnnnnnnnnnnnnnnnnnnnnnnnnnnnnnnnnnnnnnnnnnnnnnnnnnnnnnnnnnnnnnnnnnnnnnnnnnnnnnnnnnnnnnnnnnnnnnnnnnnnnnnnnnnnnnnnnnnnnnnnnnnnnnnnnnnnnnnnnnnnnnnnnnnnnnnnnnnnnnnnnnnnnnnnnnnnnnnnnnnnnnnnnnnnnnnnnnnnnnnnnnnnnnnnnnnnnnnnnnnnnnnnnnnnnnnnnnnnnnnnnnnnnnnnnnnnnnnnnnnnnnnnnnnnnnnnnnnnnnnnnnnnnnnnnnnnnnnnnnnnnnnnnnnnnnnnnnnnnnnnnnnnnnnnnnnnnnnnnnnnnnnnnnnnnnnnnnnnnnnnnnnnnnnnnnnnnnnnnnnnnnnnnnnnnnnnnnnnnnnnnnnnnnnnnnnnnnnnnnnnnnnnnnnnnnnnnnnnnnnnnnnnnnnnnnnnnnnnnnnnnnnnnnnnnnnnnnnnnnnnnnnnnnnnnnnnnnnnnnnnnnnnnnnnnnnnnnnnnnnnnnnnnnnnnnnnnnnnnnnnnnnnnnnnnnnnnnnnnnnnnnnnnnnnnnnnnnnnnnnnnnnnnnnnnnnnnnnnnnnnnnnnnnnnnnnnnnnnnnnnnnnnnnnnnnnnnnnnnnnnnnnnnnnnnnnnnnnnnnnnnnnnnnnnnnnnnnnnnnnnnnnnnnnnnnnnnnnnnnnnnnnnnnnnnnnnnnnnnnnnnnnnnnnnnnnnnnnnnnnnnnnnnnnnnnnnnnnnnnnnnnnnnnnnnnnnnnnnnnnnnnnnnnnnnnnnnnnnnnnnnnnnnnnnnnnnnnnnnnnnnnnnnnnnnnnnnnnnnnnnnnnnnnnnnnnnnnnnnnnnnnnnnnnnnnnnnnnnnnnnnnnnnnnnnnnnnnnnnnnnnnnnnnnnnnnnnnnnnnnnnnnnnnnnnnnnnnnnnnnnnnnnnnnnnnnnnnnnnnnnnnnnnnnnnnnnnnnnnnnnnnnnnnnnnnnnnnnnnnnnnnnnnnnnnnnnnnnnnnnnnnnnnnnnnnnnnnnnnnnnnnnnnnnnnnnnnnnnnnnnnnnnnnnnnnnnnnnnnnnnnnnnnnnnnnnnnnnnnnnnnnnnnnnnnnnnnnnnnnnnnnnnnnnnnnnnnnnnnnnnnnnnnnnnnnnnnnnnnnnnnnnnnnnnnnnnnnnnnnnnnnnnnnnnnnnnnnnnnnnnnnnnnnnnnnnnnnnnnnnnnnnnnnnnnnnnnnnnnnnnnnnnnnnnnnnnnnnnnnnnnnnnnnnnnnnnnnnnnnnnnnnnnnnnnnnnnnnnnnnnnnnnnnnnnnnnnnnnnnnnnnnnnnnnnnnnnnnnnnnnnnnnnnnnnnnnnnnnnnnnnnnnnnnnnnnnnnnnnnnnnnnnnnnnnnnnnnnnnnnnnnnnnnnnnnnnnnnnnnnnnnnnnnnnnnnnnnnnnnnnnnnnnnnnnnnnnnnnnnnnnnnnnnnnnnnnnnnnnnnnnnnnnnnnnnnnnnnnnnnnnnnnnnnnnnnnnnnnnnnnnnnnnnnnnnnnnnnnnnnnnnnnnnnnnnnnnnnnnnnnnnnnnnnnnnnnnnnnnnnnnnnnnnnnnnnnnnnnnnnnnnnnnnnnnnnnnnnnnnnnnnnnnnnnnnnnnnnnnnnnnnnnnnnnnnnnnnnnnnnnnnnnnnnnnnnnnnnnnnnnnnnnnnnnnnnnnnnnnnnnnnnnnnnnnnnnnnnnnnnnnnnnnnnnnnnnnnnnnnnnnnnnnnnnnnnnnnnnnnnnnnnnnnnnnnnnnnnnnnnnnnnnnnnnnnnnnnnnnnnnnnnnnnnnnnnnnnnnnnnnnnnnnnnnnnnnnnnnnnnnnnnnnnnnnnnnnnnnnnnnnnnnnnnnnnnnnnnnnnnnnnnnnnnnnnnnnnnnnnnnnnnnnnnnnnnnnnnnnnnnnnnnnnnnnnnnnnnnnnnnnnnnnnnnnnnnnnnnnnnnnnnnnnnnnnnnnnnnnnnnnnnnnnnnnnnnnnnnnnnnnnnnnnnnnnnnnnnnnnnnnnnnnnnnnnnnnnnnnnnnnnnnnnnnnnnnnnnnnnnnnnnnnnnnnnnnnnnnnnnnnnnnnnnnnnnnnnnnnnnnnnnnnnnnnnnnnnnnnnnnnnnnnnnnnnnnnnnnnnnnnnnnnnnnnnnnnnnnnnnnnnnnnnnnnnnnnnnnnnnnnnnnnnnnnnnnnnnnnnnnnnnnnnnnnnnnnnnnnnnnnnnnnnnnnnnnnnnnnnnnnnnnnnnnnnnnnnnnnnnnnnnnnnnnnnnnnnnnnnnnnnnnnnnnnnnnnnnnnnnnnnnnnnnnnnnnnnnnnnnnnnnnnnnnnnnnnnnnnnnnnnnnnnnnnnnnnnnnnnnnnnnnnnnnnnnnnnnnnnnnnnnnnnnnnnnnnnnnnnnnnnnnnnnnnnnnnnnnnnnnnnnnnnnnnnnnnnnnnnnnnnnnnnnnnnnnnnnnnnnnnnnnnnnnnnnnnnnnnnnnnnnnnnnnnnnnnnnnnnnnnnnnnnnnnnnnnnnnnnnnnnnnnnnnnnnnnnnnnnnnnnnnnnnnnnnnnnnnnnnnnnnnnnnnnnnnnnnnnnnnnnnnnnnnnnnnnnnnnnnnnnnnnnnnnnnnnnnnnnnnnnnnnnnnnnnnnnnnnnnnnnnnnnnnnnnnnnnnnnnnnnnnnnnnnnnnnnnnnnnnnnnnnnnnnnnnnnnnnnnnnnnnnnnnnnnnnnnnnnnnnnnnnnnnnnnnnnnnnnnnnnnnnnnnnnnnnnnnnnnnnnnnnnnnnnnnnnnnnnnnnnnnnnnnnnnnnnnnnnnnnnnnnnnnnnnnnnnnnnnnnnnnnnnnnnnnnnnnnnnnnnnnnnnnnnnnnnnnnnnnnnnnnnnnnnnnnnnnnnnnnnnnnnnnnnnnnnnnnnnnnnnnnnnnnnnnnnnnnnnnnnnnnnnnnnnnnnnnnnnnnnnnnnnnnnnnnnnnnnnnnnnnnnnnnnnnnnnnnnnnnnnnnnnnnnnnnnnnnnnnnnnnnnnnnnnnnnnnnnnnnnnnnnnnnnnnnnnnnnnnnnnnnnnnnnnnnnnnnnnnnnnnnnnnnnnnnnnnnnnnnnnnnnnnnnnnnnnnnnnnnnnnnnnnnnnnnnnnnnnnnnnnnnnnnnnnnnnnnnnnnnnnnnnnnnnnnnnnnnnnnnnnnnnnnnnnnnnnnnnnnnnnnnnnnnnnnnnnnnnnnnnnnnnnnnnnnnnnnnnnnnnnnnnnnnnnnnnnnnnnnnnnnnnnnnnnnnnnnnnnnnnnnnnnnnnnnnnnnnnnnnnnnnnnnnnnnnnnnnnnnnnnnnnnnnnnnnnnnnnnnnnnnnnnnnnnnnnnnnnnnnnnnnnnnnnnnnnnnnnnnnnnnnnnnnnnnnnnnnnnnnnnnnnnnnnnnnnnnnnnnnnnnnnnnnnnnnnnnnnnnnnnnnnnnnnnnnnnnnnnnnnnnnnnnnnnnnnnnnnnnnnnnnnnnnnnnnnnnnnnnnnnnnnnnnnnnnnnnnnnnnnnnnnnnnnnnnnnnnnnnnnnnnnnnnnnnnnnnnnnnnnnnnnnnnnnnnnnnnnnnnnnnnnnnnnnnnnnnnnnnnnnnnnnnnnnnnnnnnnnnnnnnnnnnnnnnnnnnnnnnnnnnnnnnnnnnnnnnnnnnnnnnnnnnnnnnnnnnnnnnnnnnnnnnnnnnnnnnnnnnnnnnnnnnnnnnnnnnnnnnnnnnnnnnnnnnnnnnnnnnnnnnnnnnnnnnnnnnnnnnnnnnnnnnnnnnnnnnnnnnnnnnnnnnnnnnnnnnnnnnnnnnnnnnnnnnnnnnnnnnnnnnnnnnnnnnnnnnnnnnnnnnnnnnnnnnnnnnnnnnnnnnnnnnnnnnnnnnnnnnnnnnnnnnnnnnnnnnnnnnnnnnnnnnnnnnnnnnnnnnnnnnnnnnnnnnnnnnnnnnnnnnnnnnnnnnnnnnnnnnnnnnnnnnnnnnnnnnnnnnnnnnnnnnnnnnnnnnnnnnnnnnnnnnnnnnnnnnnnnnnnnnnnnnnnnnnnnnnnnnnnnnnnnnnnnnnnnnnnnnnnnnnnnnnnnnnnnnnnnnnnnnnnnnnnnnnnnnnnnnnnnnnnnnnnnnnnnnnnnnnnnnnnnnnnnnnnnnnnnnnnnnnnnnnnnnnnnnnnnnnnnnnnnnnnnnnnnnnnnnnnnnnnnnnnnnnnnnnnnnnnnnnnnnnnnnnnnnnnnnnnnnnnnnnnnnnnnnnnnnnnnnnnnnnnnnnnnnnnnnnnnnnnnnnnnnnnnnnnnnnnnnnnnnnnnnnnnnnnnnnnnnnnnnnnnnnnnnnnnnnnnnnnnnnnnnnnnnnnnnnnnnnnnnnnnnnnnnnnnnnnnnnnnnnnnnnnnnnnnnnnnnnnnnnnnnnnnnnnnnnnnnnnnnnnnnnnnnnnnnnnnnnnnnnnnnnnnnnnnnnnnnnnnnnnnnnnnnnnnnnnnnnnnnnnnnnnnnnnnnnnnnnnnnnnnnnnnnnnnnnnnnnnnnnnnnnnnnnnnnnnnnnnnnnnnnnnnnnnnnnnnnnnnnnnnnnnnnnnnnnnnnnnnnnnnnnnnnnnnnnnnnnnnnnnnnnnnnnnnnnnnnnnnnnnnnnnnnnnnnnnnnnnnnnnnnnnnnnnnnnnnnnnnnnnnnnnnnnnnnnnnnnnnnnnnnnnnnnnnnnnnnnnnnnnnnnnnnnnnnnnnnnnnnnnnnnnnnnnnnnnnnnnnnnnnnnnnnnnnnnnnnnnnnnnnnnnnnnnnnnnnnnnnnnnnnnnnnnnnnnnnnnnnnnnnnnnnnnnnnnnnnnnnnnnnnnnnnnnnnnnnnnnnnnnnnnnnnnnnnnnnnnnnnnnnnnnnnnnnnnnnnnnnnnnnnnnnnnnnnnnnnnnnnnnnnnnnnnnnnnnnnnnnnnnnnnnnnnnnnnnnnnnnnnnnnnnnnnnnnnnnnnnnnnnnnnnnnnnnnnnnnnnnnnnnnnnnnnnnnnnnnnnnnnnnnnnnnnnnnnnnnnnnnnnnnnnnnnnnnnnnnnnnnnnnnnnnnnnnnnnnnnnnnnnnnnnnnnnnnnnnnnnnnnnnnnnnnnnnnnnnnnnnnnnnnnnnnnnnnnnnnnnnnnnnnnnnnnnnnnnnnnnnnnnnnnnnnnnnnnnnnnnnnnnnnnnnnnnnnnnnnnnnnnnnnnnnnnnnnnnnnnnnnnnnnnnnnnnnnnnnnnnnnnnnnnnnnnnnnnnnnnnnnnnnnnnnnnnnnnnnnnnnnnnnnnnnnnnnnnnnnnnnnnnnnnnnnnnnnnnnnnnnnnnnnnnnnnnnnnnnnnnnnnnnnnnnnnnnnnnnnnnnnnnnnnnnnnnnnnnnnnnnnnnnnnnnnnnnnnnnnnnnnnnnnnnnnnnnnnnnnnnnnnnnnnnnnnnnnnnnnnnnnnnnnnnnnnnnnnnnnnnnnnnnnnnnnnnnnnnnnnnnnnnnnnnnnnnnnnnnnnnnnnnnnnnnnnnnnnnnnnnnnnnnnnnnnnnnnnnnnnnnnnnnnnnnnnnnnnnnnnnnnnnnnnnnnnnnnnnnnnnnnnnnnnnnnnnnnnnnnnnnnnnnnnnnnnnnnnnnnnnnnnnnnnnnnnnnnnnnnnnnnnnnnnnnnnnnnnnnnnnnnnnnnnnnnnnnnnnnnnnnnnnnnnnnnnnnnnnnnnnnnnnnnnnnnnnnnnnnnnnnnnnnnnnnnnnnnnnnnnnnnnnnnnnnnnnnnnnnnnnnnnnnnnnnnnnnnnnnnnnnnnnnnnnnnnnnnnnnnnnnnnnnnnnnnnnnnnnnnnnnnnnnnnnnnnnnnnnnnnnnnnnnnnnnnnnnnnnnnnnnnnnnnnnnnnnnnnnnnnnnnnnnnnnnnnnnnnnnnnnnnnnnnnnnnnnnnnnnnnnnnnnnnnnnnnnnnnnnnnnnnnnnnnnnnnnnnnnnnnnnnnnnnnnnnnnnnnnnnnnnnnnnnnnnnnnnnnnnnnnnnnnnnnnnnnnnnnnnnnnnnnnnnnnnnnnnnnnnnnnnnnnnnnnnnnnnnnnnnnnnnnnnnnnnnnnnnnnnnnnnnnnnnnnnnnnnnnnnnnnnnnnnnnnnnnnnnnnnnnnnnnnnnnnnnnnnnnnnnnnnnnnnnnnnnnnnnnnnnnnnnnnnnnnnnnnnnnnnnnnnnnnnnnnnnnnnnnnnnnnnnnnnnnnnnnnnnnnnnnnnnnnnnnnnnnnnnnnnnnnnnnnnnnnnnnnnnnnnnnnnnnnnnnnnnnnnnnnnnnnnnnnnnnnnnnnnnnnnnnnnnnnnnnnnnnnnnnnnnnnnnnnnnnnnnnnnnnnnnnnnnnnnnnnnnnnnnnnnnnnnnnnnnnnnnnnnnnnnnnnnnnnnnnnnnnnnnnnnnnnnnnnnnnnnnnnnnnnnnnnnnnnnnnnnnnnnnnnnnnnnnnnnnnnnnnnnnnnnnnnnnnnnnnnnnnnnnnnnnnnnnnnnnnnnnnnnnnnnnnnnnnnnnnnnnnnnnnnnnnnnnnnnnnnnnnnnnnnnnnnnnnnnnnnnnnnnnnnnnnnnnnnnnnnnnnnnnnnnnnnnnnnnnnnnnnnnnnnnnnnnnnnnnnnnnnnnnnnnnnnnnnnnnnnnnnnnnnnnnnnnnnnnnnnnnnnnnnnnnnnnnnnnnnnnnnnnnnnnnnnnnnnnnnnnnnnnnnnnnnnnnnnnnnnnnnnnnnnnnnnnnnnnnnnnnnnnnnnnnnnnnnnnnnnnnnnnnnnnnnnnnnnnnnnnnnnnnnnnnnnnnnnnnnnnnnnnnnnnnnnnnnnnnnnnnnnnnnnnnnnnnnnnnnnnnnnnnnnnnnnnnnnnnnnnnnnnnnnnnnnnnnnnnnnnnnnnnnnnnnnnnnnnnnnnnnnnnnnnnnnnnnnnnnnnnnnnnnnnnnnnnnnnnnnnnnnnnnnnnnnnnnnnnnnnnnnnnnnnnnnnnnnnnnnnnnnnnnnnnnnnnnnnnnnnnnnnnnnnnnnnnnnnnnnnnnnnnnnnnnnnnnnnnnnnnnnnnnnnnnnnnnnnnnnnnnnnnnnnnnnnnnnnnnnnnnnnnnnnnnnnnnnnnnnnnnnnnnnnnnnnnnnnnnnnnnnnnnnnnnnnnnnnnnnnnnnnnnnnnnnnnnnnnnnnnnnnnnnnnnnnnnnnnnnnnnnnnnnnnnnnnnnnnnnnnnnnnnnnnnnnnnnnnnnnnnnnnnnnnnnnnnnnnnnnnnnnnnnnnnnnnnnnnnnnnnnnnnnnnnnnnnnnnnnnnnnnnnnnnnnnnnnnnnnnnnnnnnnnnnnnnnnnnnnnnnnnnnnnnnnnnnnnnnnnnnnnnnnnnnnnnnnnnnnnnnnnnnnnnnnnnnnnnnnnnnnnnnnnnnnnnnnnnnnnnnnnnnnnnnnnnnnnnnnnnnnnnnnnnnnnnnnnnnnnnnnnnnnnnnnnnnnnnnnnnnnnnnnnnnnnnnnnnnnnnnnnnnnnnnnnnnnnnnnnnnnnnnnnnnnnnnnnnnnnnnnnnnnnnnnnnnnnnnnnnnnnnnnnnnnnnnnnnnnnnnnnnnnnnnnnnnnnnnnnnnnnnnnnnnnnnnnnnnnnnnnnnnnnnnnnnnnnnnnnnnnnnnnnnnnnnnnnnnnnnnnnnnnnnnnnnnnnnnnnnnnnnnnnnnnnnnnnnnnnnnnnnnnnnnnnnnnnnnnnnnnnnnnnnnnnnnnnnnnnnnnnnnnnnnnnnnnnnnnnnnnnnnnnnnnnnnnnnnnnnnnnnnnnnnnnnnnnnnnnnnnnnnnnnnnnnnnnnnnnnnnnnnnnnnnnnnnnnnnnnnnnnnnnnnnnnnnnnnnnnnnnnnnnnnnnnnnnnnnnnnnnnnnnnnnnnnnnnnnnnnnnnnnnnnnnnnnnnnnnnnnnnnnnnnnnnnnnnnnnnnnnnnnnnnnnnnnnnnnnnnnnnnnnnnnnnnnnnnnnnnnnnnnnnnnnnnnnnnnnnnnnnnnnnnnnnnnnnnnnnnnnnnnnnnnnnnnnnnnnnnnnnnnnnnnnnnnnnnnnnnnnnnnnnnnnnnnnnnnnnnnnnnnnnnnnnnnnnnnnnnnnnnnnnnnnnnnnnnnnnnnnnnnnnnnnnnnnnnnnnnnnnnnnnnnnnnnnnnnnnnnnnnnnnnnnnnnnnnnnnnnnnnnnnnnnnnnnnnnnnnnnnnnnnnnnnnnnnnnnnnnnnnnnnnnnnnnnnnnnnnnnnnnnnnnnnnnnnnnnnnnnnnnnnnnnnnnnnnnnnnnnnnnnnnnnnnnnnnnnnnnnnnnnnnnnnnnnnnnnnnnnnnnnnnnnnnnnnnnnnnnnnnnnnnnnnnnnnnnnnnnnnnnnnnnnnnnnnnnnnnnnnnnnnnnnnnnnnnnnnnnnnnnnnnnnnnnnnnnnnnnnnnnnnnnnnnnnnnnnnnnnnnnnnnnnnnnnnnnnnnnnnnnnnnnnnnnnnnnnnnnnnnnnnnnnnnnnnnnnnnnnnnnnnnnnnnnnnnnnnnnnnnnnnnnnnnnnnnnnnnnnnnnnnnnnnnnnnnnnnnnnnnnnnnnnnnnnnnnnnnnnnnnnnnnnnnnnnnnnnnnnnnnnnnnnnnnnnnnnnnnnnnnnnnnnnnnnnnnnnnnnnnnnnnnnnnnnnnnnnnnnnnnnnnnnnnnnnnnnnnnnnnnnnnnnnnnnnnnnnnnnnnnnnnnnnnnnnnnnnnnnnnnnnnnnnnnnnnnnnnnnnnnnnnnnnnnnnnnnnnnnnnnnnnnnnnnnnnnnnnnnnnnnnnnnnnnnnnnnnnnnnnnnnnnnnnnnnnnnnnnnnnnnnnnnnnnnnnnnnnnnnnnnnnnnnnnnnnnnnnnnnnnnnnnnnnnnnnnnnnnnnnnnnnnnnnnnnnnnnnnnnnnnnnnnnnnnnnnnnnnnnnnnnnnnnnnnnnnnnnnnnnnnnnnnnnnnnnnnnnnnnnnnnnnnnnnnnnnnnnnnnnnnnnnnnnnnnnnnnnnnnnnnnnnnnnnnnnnnnnnnnnnnnnnnnnnnnnnnnnnnnnnnnnnnnnnnnnnnnnnnnnnnnnnnnnnnnnnnnnnnnnnnnnnnnnnnnnnnnnnnnnnnnnnnnnnnnnnnnnnnnnnnnnnnnnnnnnnnnnnnnnnnnnnnnnnnnnnnnnnnnnnnnnnnnnnnnnnnnnnnnnnnnnnnnnnnnnnnnnnnnnnnnnnnnnnnnnnnnnnnnnnnnnnnnnnnnnnnnnnnnnnnnnnnnnnnnnnnnnnnnnnnnnnnnnnnnnnnnnnnnnnnnnnnnnnnnnnnnnnnnnnnnnnnnnnnnnnnnnnnnnnnnnnnnnnnnnnnnnnnnnnnnnnnnnnnnnnnnnnnnnnnnnnnnnnnnnnnnnnnnnnnnnnnnnnnnnnnnnnnnnnnnnnnnnnnnnnnnnnnnnnnnnnnnnnnnnnnnnnnnnnnnnnnnnnnnnnnnnnnnnnnnnnnnnnnnnnnnnnnnnnnnnnnnnnnnnnnnnnnnnnnnnnnnnnnnnnnnnnnnnnnnnnnnnnnnnnnnnnnnnnnnnnnnnnnnnnnnnnnnnnnnnnnnnnnnnnnnnnnnnnnnnnnnnnnnnnnnnnnnnnnnnnnnnnnnnnnnnnnnnnnnnnnnnnnnnnnnnnnnnnnnnnnnnnnnnnnnnnnnnnnnnnnnnnnnnnnnnnnnnnnnnnnnnnnnnnnnnnnnnnnnnnnnnnnnnnnnnnnnnnnnnnnnnnnnnnnnnnnnnnnnnnnnnnnnnnnnnnnnnnnnnnnnnnnnnnnnnnnnnnnnnnnnnnnnnnnnnnnnnnnnnnnnnnnnnnnnnnnnnnnnnnnnnnnnnnnnnnnnnnnnnnnnnnnnnnnnnnnnnnnnnnnnnnnnnnnnnnnnnnnnnnnnnnnnnnnnnnnnnnnnnnnnnnnnnnnnnnnnnnnnnnnnnnnnnnnnnnnnnnnnnnnnnnnnnnnnnnnnnnnnnnnnnnnnnnnnnnnnnnnnnnnnnnnnnnnnnnnnnnnnnnnnnnnnnnnnnnnnnnnnnnnnnnnnnnnnnnnnnnnnnnnnnnnnnnnnnnnnnnnnnnnnnnnnnnnnnnnnnnnnnnnnnnnnnnnnnnnnnnnnnnnnnnnnnnnnnnnnnnnnnnnnnnnnnnnnnnnnnnnnnnnnnnnnnnnnnnnnnnnnnnnnnnnnnnnnnnnnnnnnnnnnnnnnnnnnnnnnnnnnnnnnnnnnnnnnnnnnnnnnnnnnnnnnnnnnnnnnnnnnnnnnnnnnnnnnnnnnnnnnnnnnnnnnnnnnnnnnnnnnnnnnnnnnnnnnnnnnnnnnnnnnnnnnnnnnnnnnnnnnnnnnnnnnnnnnnnnnnnnnnnnnnnnnnnnnnnnnnnnnnnnnnnnnnnnnnnnnnnnnnnnnnnnnnnnnnnnnnnnnnnnnnnnnnnnnnnnnnnnnnnnnnnnnnnnnnnnnnnnnnnnnnnnnnnnnnnnnnnnnnnnnnnnnnnnnnnnnnnnnnnnnnnnnnnnnnnnnnnnnnnnnnnnnnnnnnnnnnnnnnnnnnnnnnnnnnnnnnnnnnnnnnnnnnnnnnnnnnnnnnnnnnnnnnnnnnnnnnnnnnnnnnnnnnnnnnnnnnnnnnnnnnnnnnnnnnnnnnnnnnnnnnnnnnnnnnnnnnnnnnnnnnnnnnnnnnnnnnnnnnnnnnnnnnnnnnnnnnnnnnnnnnnnnnnnnnnnnnnnnnnnnnnnnnnnnnnnnnnnnnnnnnnnnnnnnnnnnnnnnnnnnnnnnnnnnnnnnnnnnnnnnnnnnnnnnnnnnnnnnnnnnnnnnnnnnnnnnnnnnnnnnnnnnnnnnnnnnnnnnnnnnnnnnnnnnnnnnnnnnnnnnnnnnnnnnnnnnnnnnnnnnnnnnnnnnnnnnnnnnnnnnnnnnnnnnnnnnnnnnnnnnnnnnnnnnnnnnnnnnnnnnnnnnnnnnnnnnnnnnnnnnnnnnnnnnnnnnnnnnnnnnnnnnnnnnnnnnnnnnnnnnnnnnnnnnnnnnnnnnnnnnnnnnnnnnnnnnnnnnnnnnnnnnnnnnnnnnnnnnnnnnnnnnnnnnnnnnnnnnnnnnnnnnnnnnnnnnnnnnnnnnnnnnnnnnnnnnnnnnnnnnnnnnnnnnnnnnnnnnnnnnnnnnnnnnnnnnnnnnnnnnnnnnnnnnnnnnnnnnnnnnnnnnnnnnnnnnnnnnnnnnnnnnnnnnnnnnnnnnnnnnnnnnnnnnnnnnnnnnnnnnnnnnnnnnnnnnnnnnnnnnnnnnnnnnnnnnnnnnnnnnnnnnnnnnnnnnnnnnnnnnnnnnnnnnnnnnnnnnnnnnnnnnnnnnnnnnnnnnnnnnnnnnnnnnnnnnnnnnnnnnnnnnnnnnnnnnnnnnnnnnnnnnnnnnnnnnnnnnnnnnnnnnnnnnnnnnnnnnnnnnnnnnnnnnnnnnnnnnnnnnnnnnnnnnnnnnnnnnnnnnnnnnnnnnnnnnnnnnnnnnnnnnnnnnnnnnnnnnnnnnnnnnnnnnnnnnnnnnnnnnnnnnnnnnnnnnnnnnnnnnnnnnnnnnnnnnnnnnnnnnnnnnnnnnnnnnnnnnnnnnnnnnnnnnnnnnnnnnnnnnnnnnnnnnnnnnnnnnnnnnnnnnnnnnnnnnnnnnnnnnnnnnnnnnnnnnnnnnnnnnnnnnnnnnnnnnnnnnnnnnnnnnnnnnnnnnnnnnnnnnnnnnnnnnnnnnnnnnnnnnnnnnnnnnnnnnnnnnnnnnnnnnnnnnnnnnnnnnnnnnnnnnnnnnnnnnnnnnnnnnnnnnnnnnnnnnnnnnnnnnnnnnnnnnnnnnnnnnnnnnnnnnnnnnnnnnnnnnnnnnnnnnnnnnnnnnnnnnnnnnnnnnnnnnnnnnnnnnnnnnnnnnnnnnnnnnnnnnnnnnnnnnnnnnnnnnnnnnnnnnnnnnnnnnnnnnnnnnnnnnnnnnnnnnnnnnnnnnnnnnnnnnnnnnnnnnnnnnnnnnnnnnnnnnnnnnnnnnnnnnnnnnnnnnnnnnnnnnnnnnnnnnnnnnnnnnnnnnnnnnnnnnnnnnnnnnnnnnnnnnnnnnnnnnnnnnnnnnnnnnnnnnnnnnnnnnnnnnnnnnnnnnnnnnnnnnnnnnnnnnnnnnnnnnnnnnnnnnnnnnnnnnnnnnnnnnnnnnnnnnnnnnnnnnnnnnnnnnnnnnnnnnnnnnnnnnnnnnnnnnnnnnnnnnnnnnnnnnnnnnnnnnnnnnnnnnnnnnnnnnnnnnnnnnnnnnnnnnnnnnnnnnnnnnnnnnnnnnnnnnnnnnnnnnnnnnnnnnnnnnnnnnnnnnnnnnnnnnnnnnnnnnnnnnnnnnnnnnnnnnnnnnnnnnnnnnnnnnnnnnnnnnnnnnnnnnnnnnnnnnnnnnnnnnnnnnnnnnnnnnnnnnnnnnnnnnnnnnnnnnnnnnnnnnnnnnnnnnnnnnnnnnnnnnnnnnnnnnnnnnnnnnnnnnnnnnnnnnnnnnnnnnnnnnnnnnnnnnnnnnnnnnnnnnnnnnnnnnnnnnnnnnnnnnnnnnnnnnnnnnnnnnnnnnnnnnnnnnnnnnnnnnnnnnnnnnnnnnnnnnnnnnnnnnnnnnnnnnnnnnnnnnnnnnnnnnnnnnnnnnnnnnnnnnnnnnnnnnnnnnnnnnnnnnnnnnnnnnnnnnnnnnnnnnnnnnnnnnnnnnnnnnnnnnnnnnnnnnnnnnnnnnnnnnnnnnnnnnnnnnnnnnnnnnnnnnnnnnnnnnnnnnnnnnnnnnnnnnnnnnnnnnnnnnnnnnnnnnnnnnnnnnnnnnnnnnnnnnnnnnnnnnnnnnnnnnnnnnnnnnnnnnnnnnnnnnnnnnnnnnnnnnnnnnnnnnnnnnnnnnnnnnnnnnnnnnnnnnnnnnnnnnnnnnnnnnnnnnnnnnnnnnnnnnnnnnnnnnnnnnnnnnnnnnnnnnnnnnnnnnnnnnnnnnnnnnnnnnnnnnnnnnnnnnnnnnnnnnnnnnnnnnnnnnnnnnnnnnnnnnnnnnnnnnnnnnnnnnnnnnnnnnnnnnnnnnnnnnnnnnnnnnnnnnnnnnnnnnnnnnnnnnnnnnnnnnnnnnnnnnnnnnnnnnnnnnnnnnnnnnnnnnnnnnnnnnnnnnnnnnnnnnnnnnnnnnnnnnnnnnnnnnnnnnnnnnnnnnnnnnnnnnnnnnnnnnnnnnnnnnnnnnnnnnnnnnnnnnnnnnnnnnnnnnnnnnnnnnnnnnnnnnnnnnnnnnnnnnnnnnnnnnnnnnnnnnnnnnnnnnnnnnnnnnnnnnnnnnnnnnnnnnnnnnnnnnnnnnnnnnnnnnnnnnnnnnnnnnnnnnnnnnnnnnnnnnnnnnnnnnnnnnnnnnnnnnnnnnnnnnnnnnnnnnnnnnnnnnnnnnnnnnnnnnnnnnnnnnnnnnnnnnnnnnnnnnnnnnnnnnnnnnnnnnnnnnnnnnnnnnnnnnnnnnnnnnnnnnnnnnnnnnnnnnnnnnnnnnnnnnnnnnnnnnnnnnnnnnnnnnnnnnnnnnnnnnnnnnnnnnnnnnnnnnnnnnnnnnnnnnnnnnnnnnnnnnnnnnnnnnnnnnnnnnnnnnnnnnnnnnnnnnnnnnnnnnnnnnnnnnnnnnnnnnnnnnnnnnnnnnnnnnnnnnnnnnnnnnnnnnnnnnnnnnnnnnnnnnnnnnnnnnnnnnnnnnnnnnnnnnnnnnnnnnnnnnnnnnnnnnnnnnnnnnnnnnnnnnnnnnnnnnnnnnnnnnnnnnnnnnnnnnnnnnnnnnnnnnnnnnnnnnnnnnnnnnnnnnnnnnnnnnnnnnnnnnnnnnnnnnnnnnnnnnnnnnnnnnnnnnnnnnnnnnnnnnnnnnnnnnnnnnnnnnnnnnnnnnnnnnnnnnnnnnnnnnnnnnnnnnnnnnnnnnnnnnnnnnnnnnnnnnnnnnnnnnnnnnnnnnnnnnnnnnnnnnnnnnnnnnnnnnnnnnnnnnnnnnnnnnnnnnnnnnnnnnnnnnnnnnnnnnnnnnnnnnnnnnnnnnnnnnnnnnnnnnnnnnnnnnnnnnnnnnnnnnnnnnnnnnnnnnnnnnnnnnnnnnnnnnnnnnnnnnnnnnnnnnnnnnnnnnnnnnnnnnnnnnnnnnnnnnnnnnnnnnnnnnnnnnnnnnnnnnnnnnnnnnnnnnnnnnnnnnnnnnnnnnnnnnnnnnnnnnnnnnnnnnnnnnnnnnnnnnnnnnnnnnnnnnnnnnnnnnnnnnnnnnnnnnnnnnnnnnnnnnnnnnnnnnnnnnnnnnnnnnnnnnnnnnnnnnnnnnnnnnnnnnnnnnnnnnnnnnnnnnnnnnnnnnnnnnnnnnnnnnnnnnnnnnnnnnnnnnnnnnnnnnnnnnnnnnnnnnnnnnnnnnnnnnnnnnnnnnnnnnnnnnnnnnnnnnnnnnnnnnnnnnnnnnnnnnnnnnnnnnnnnnnnnnnnnnnnnnnnnnnnnnnnnnnnnnnnnnnnnnnnnnnnnnnnnnnnnnnnnnnnnnnnnnnnnnnnnnnnnnnnnnnnnnnnnnnnnnnnnnnnnnnnnnnnnnnnnnnnnnnnnnnnnnnnnnnnnnnnnnnnnnnnnnnnnnnnnnnnnnnnnnnnnnnnnnnnnnnnnnnnnnnnnnnnnnnnnnnnnnnnnnnnnnnnnnnnnnnnnnnnnnnnnnnnnnnnnnnnnnnnnnnnnnnnnnnnnnnnnnnnnnnnnnnnnnnnnnnnnnnnnnnnnnnnnnnnnnnnnnnnnnnnnnnnnnnnnnnnnnnnnnnnnnnnnnnnnnnnnnnnnnnnnnnnnnnnnnnnnnnnnnnnnnnnnnnnnnnnnnnnnnnnnnnnnnnnnnnnnnnnnnnnnnnnnnnnnnnnnnnnnnnnnnnnnnnnnnnnnnnnnnnnnnnnnnnnnnnnnnnnnnnnnnnnnnnnnnnnnnnnnnnnnnnnnnnnnnnnnnnnnnnnnnnnnnnnnnnnnnnnnnnnnnnnnnnnnnnnnnnnnnnnnnnnnnnnnnnnnnnnnnnnnnnnnnnnnnnnnnnnnnnnnnnnnnnnnnnnnnnnnnnnnnnnnnnnnnnnnnnnnnnnnnnnnnnnnnnnnnnnnnnnnnnnnnnnnnnnnnnnnnnnnnnnnnnnnnnnnnnnnnnnnnnnnnnnnnnnnnnnnnnnnnnnnnnnnnnnnnnnnnnnnnnnnnnnnnnnnnnnnnnnnnnnnnnnnnnnnnnnnnnnnnnnnnnnnnnnnnnnnnnnnnnnnnnnnnnnnnnnnnnnnnnnnnnnnnnnnnnnnnnnnnnnnnnnnnnnnnnnnnnnnnnnnnnnnnnnnnnnnnnnnnnnnnnnnnnnnnnnnnnnnnnnnnnnnnnnnnnnnnnnnnnnnnnnnnnnnnnnnnnnnnnnnnnnnnnnnnnnnnnnnnnnnnnnnnnnnnnnnnnnnnnnnnnnnnnnnnnnnnnnnnnnnnnnnnnnnnnnnnnnnnnnnnnnnnnnnnnnnnnnnnnnnnnnnnnnnnnnnnnnnnnnnnnnnnnnnnnnnnnnnnnnnnnnnnnnnnnnnnnnnnnnnnnnnnnnnnnnnnnnnnnnnnnnnnnnnnnnnnnnnnnnnnnnnnnnnnnnnnnnnnnnnnnnnnnnnnnnnnnnnnnnnnnnnnnnnnnnnnnnnnnnnnnnnnnnnnnnnnnnnnnnnnnnnnnnnnnnnnnnnnnnnnnnnnnnnnnnnnnnnnnnnnnnnnnnnnnnnnnnnnnnnnnnnnnnnnnnnnnnnnnnnnnnnnnnnnnnnnnnnnnnnnnnnnnnnnnnnnnnnnnnnnnnnnnnnnnnnnnnnnnnnnnnnnnnnnnnnnnnnnnnnnnnnnnnnnnnnnnnnnnnnnnnnnnnnnnnnnnnnnnnnnnnnnnnnnnnnnnnnnnnnnnnnnnnnnnnnnnnnnnnnnnnnnnnnnnnnnnnnnnnnnnnnnnnnnnnnnnnnnnnnnnnnnnnnnnnnnnnnnnnnnnnnnnnnnnnnnnnnnnnnnnnnnnnnnnnnnnnnnnnnnnnnnnnnnnnnnnnnnnnnnnnnnnnnnnnnnnnnnnnnnnnnnnnnnnnnnnnnnnnnnnnnnnnnnnnnnnnnnnnnnnnnnnnnnnnnnnnnnnnnnnnnnnnnnnnnnnnnnnnnnnnnnnnnnnnnnnnnnnnnnnnnnnnnnnnnnnnnnnnnnnnnnnnnnnnnnnnnnnnnnnnnnnnnnnnnnnnnnnnnnnnnnnnnnnnnnnnnnnnnnnnnnnnnnnnnnnnnnnnnnnnnnnnnnnnnnnnnnnnnnnnnnnnnnnnnnnnnnnnnnnnnnnnnnnnnnnnnnnnnnnnnnnnnnnnnnnnnnnnnnnnnnnnnnnnnnnnnnnnnnnnnnnnnnnnnnnnnnnnnnnnnnnnnnnnnnnnnnnnnnnnnnnnnnnnnnnnnnnnnnnnnnnnnnnnnnnnnnnnnnnnnnnnnnnnnnnnnnnnnnnnnnnnnnnnnnnnnnnnnnnnnnnnnnnnnnnnnnnnnnnnnnnnnnnnnnnnnnnnnnnnnnnnnnnnnnnnnnnnnnnnnnnnnnnnnnnnnnnnnnnnnnnnnnnnnnnnnnnnnnnnnnnnnnnnnnnnnnnnnnnnnnnnnnnnnnnnnnnnnnnnnnnnnnnnnnnnnnnnnnnnnnnnnnnnnnnnnnnnnnnnnnnnnnnnnnnnnnnnnnnnnnnnnnnnnnnnnnnnnnnnnnnnnnnnnnnnnnnnnnnnnnnnnnnnnnnnnnnnnnnnnnnnnnnnnnnnnnnnnnnnnnnnnnnnnnnnnnnnnnnnnnnnnnnnnnnnnnnnnnnnnnnnnnnnnnnnnnnnnnnnnnnnnnnnnnnnnnnnnnnnnnnnnnnnnnnnnnnnnnnnnnnnnnnnnnnnnnnnnnnnnnnnnnnnnnnnnnnnnnnnnnnnnnnnnnnnnnnnnnnnnnnnnnnnnnnnnnnnnnnnnnnnnnnnnnnnnnnnnnnnnnnnnnnnnnnnnnnnnnnnnnnnnnnnnnnnnnnnnnnnnnnnnnnnnnnnnnnnnnnnnnnnnnnnnnnnnnnnnnnnnnnnnnnnnnnnnnnnnnnnnnnnnnnnnnnnnnnnnnnnnnnnnnnnnnnnnnnnnnnnnnnnnnnnnnnnnnnnnnnnnnnnnnnnnnnnnnnnnnnnnnnnnnnnnnnnnnnnnnnnnnnnnnnnnnnnnnnnnnnnnnnnnnnnnnnnnnnnnnnnnnnnnnnnnnnnnnnnnnnnnnnnnnnnnnnnnnnnnnnnnnnnnnnnnnnnnnnnnnnnnnnnnnnnnnnnnnnnnnnnnnnnnnnnnnnnnnnnnnnnnnnnnnnnnnnnnnnnnnnnnnnnnnnnnnnnnnnnnnnnnnnnnnnnnnnnnnnnnnnnnnnnnnnnnnnnnnnnnnnnnnnnnnnnnnnnnnnnnnnnnnnnnnnnnnnnnnnnnnnnnnnnnnnnnnnnnnnnnnnnnnnnnnnnnnnnnnnnnnnnnnnnnnnnnnnnnnnnnnnnnnnnnnnnnnnnnnnnnnnnnnnnnnnnnnnnnnnnnnnnnnnnnnnnnnnnnnnnnnnnnnnnnnnnnnnnnnnnnnnnnnnnnnnnnnnnnnnnnnnnnnnnnnnnnnnnnnnnnnnnnnnnnnnnnnnnnnnnnnnnnnnnnnnnnnnnnnnnnnnnnnnnnnnnnnnnnnnnnnnnnnnnnnnnnnnnnnnnnnnnnnnnnnnnnnnnnnnnnnnnnnnnnnnnnnnnnnnnnnnnnnnnnnnnnnnnnnnnnnnnnnnnnnnnnnnnnnnnnnnnnnnnnnnnnnnnnnnnnnnnnnnnnnnnnnnnnnnnnnnnnnnnnnnnnnnnnnnnnnnnnnnnnnnnnnnnnnnnnnnnnnnnnnnnnnnnnnnnnnnnnnnnnnnnnnnnnnnnnnnnnnnnnnnnnnnnnnnnnnnnnnnnnnnnnnnnnnnnnnnnnnnnnnnnnnnnnnnnnnnnnnnnnnnnnnnnnnnnnnnnnnnnnnnnnnnnnnnnnnnnnnnnnnnnnnnnnnnnnnnnnnnnnnnnnnnnnnnnnnnnnnnnnnnnnnnnnnnnnnnnnnnnnnnnnnnnnnnnnnnnnnnnnnnnnnnnnnnnnnnnnnnnnnnnnnnnnnnnnnnnnnnnnnnnnnnnnnnnnnnnnnnnnnnnnnnnnnnnnnnnnnnnnnnnnnnnnnnnnnnnnnnnnnnnnnnnnnnnnnnnnnnnnnnnnnnnnnnnnnnnnnnnnnnnnnnnnnnnnnnnnnnnnnnnnnnnnnnnnnnnnnnnnnnnnnnnnnnnnnnnnnnnnnnnnnnnnnnnnnnnnnnnnnnnnnnnnnnnnnnnnnnnnnnnnnnnnnnnnnnnnnnnnnnnnnnnnnnnnnnnnnnnnnnnnnnnnnnnnnnnnnnnnnnnnnnnnnnnnnnnnnnnnnnnnnnnnnnnnnnnnnnnnnnnnnnnnnnnnnnnnnnnnnnnnnnnnnnnnnnnnnnnnnnnnnnnnnnnnnnnnnnnnnnnnnnnnnnnnnnnnnnnnnnnnnnnnnnnnnnnnnnnnnnnnnnnnnnnnnnnnnnnnnnnnnnnnnnnnnnnnnnnnnnnnnnnnnnnnnnnnnnnnnnnnnnnnnnnnnnnnnnnnnnnnnnnnnnnnnnnnnnnnnnnnnnnnnnnnnnnnnnnnnnnnnnnnnnnnnnnnnnnnnnnnnnnnnnnnnnnnnnnnnnnnnnnnnnnnnnnnnnnnnnnnnnnnnnnnnnnnnnnnnnnnnnnnnnnnnnnnnnnnnnnnnnnnnnnnnnnnnnnnnnnnnnnnnnnnnnnnnnnnnnnnnnnnnnnnnnnnnnnnnnnnnnnnnnnnnnnnnnnnnnnnnnnnnnnnnnnnnnnnnnnnnnnnnnnnnnnnnnnnnnnnnnnnnnnnnnnnnnnnnnnnnnnnnnnnnnnnnnnnnnnnnnnnnnnnnnnnnnnnnnnnnnnnnnnnnnnnnnnnnnnnnnnnnnnnnnnnnnnnnnnnnnnnnnnnnnnnnnnnnnnnnnnnnnnnnnnnnnnnnnnnnnnnnnnnnnnnnnnnnnnnnnnnnnnnnnnnnnnnnnnnnnnnnnnnnnnnnnnnnnnnnnnnnnnnnnnnnnnnnnnnnnnnnnnnnnnnnnnnnnnnnnnnnnnnnnnnnnnnnnnnnnnnnnnnnnnnnnnnnnnnnnnnnnnnnnnnnnnnnnnnnnnnnnnnnnnnnnnnnnnnnnnnnnnnnnnnnnnnnnnnnnnnnnnnnnnnnnnnnnnnnnnnnnnnnnnnnnnnnnnnnnnnnnnnnnnnnnnnnnnnnnnnnnnnnnnnnnnnnnnnnnnnnnnnnnnnnnnnnnnnnnnnnnnnnnnnnnnnnnnnnnnnnnnnnnnnnnnnnnnnnnnnnnnnnnnnnnnnnnnnnnnnnnnnnnnnnnnnnnnnnnnnnnnnnnnnnnnnnnnnnnnnnnnnnnnnnnnnnnnnnnnnnnnnnnnnnnnnnnnnnnnnnnnnnnnnnnnnnnnnnnnnnnnnnnnnnnnnnnnnnnnnnnnnnnnnnnnnnnnnnnnnnnnnnnnnnnnnnnnnnnnnnnnnnnnnnnnnnnnnnnnnnnnnnnnnnnnnnnnnnnnnnnnnnnnnnnnnnnnnnnnnnnnnnnnnnnnnnnnnnnnnnnnnnnnnnnnnnnnnnnnnnnnnnnnnnnnnnnnnnnnnnnnnnnnnnnnnnnnnnnnnnnnnnnnnnnnnnnnnnnnnnnnnnnnnnnnnnnnnnnnnnnnnnnnnnnnnnnnnnnnnnnnnnnnnnnnnnnnnnnnnnnnnnnnnnnnnnnnnnnnnnnnnnnnnnnnnnnnnnnnnnnnnnnnnnnnnnnnnnnnnnnnnnnnnnnnnnnnnnnnnnnnnnnnnnnnnnnnnnnnnnnnnnnnnnnnnnnnnnnnnnnnnnnnnnnnnnnnnnnnnnnnnnnnnnnnnnnnnnnnnnnnnnnnnnnnnnnnnnnnnnnnnnnnnnnnnnnnnnnnnnnnnnnnnnnnnnnnnnnnnnnnnnnnnnnnnnnnnnnnnnnnnnnnnnnnnnnnnnnnnnnnnnnnnnnnnnnnnnnnnnnnnnnnnnnnnnnnnnnnnnnnnnnnnnnnnnnnnnnnnnnnnnnnnnnnnnnnnnnnnnnnnnnnnnnnnnnnnnnnnnnnnnnnnnnnnnnnnnnnnnnnnnnnnnnnnnnnnnnnnnnnnnnnnnnnnnnnnnnnnnnnnnnnnnnnnnnnnnnnnnnnnnnnnnnnnnnnnnnnnnnnnnnnnnnnnnnnnnnnnnnnnnnnnnnnnnnnnnnnnnnnnnnnnnnnnnnnnnnnnnnnnnnnnnnnnnnnnnnnnnnnnnnnnnnnnnnnnnnnnnnnnnnnnnnnnnnnnnnnnnnnnnnnnnnnnnnnnnnnnnnnnnnnnnnnnnnnnnnnnnnnnnnnnnnnnnnnnnnnnnnnnnnnnnnnnnnnnnnnnnnnnnnnnnnnnnnnnnnnnnnnnnnnnnnnnnnnnnnnnnnnnnnnnnnnnnnnnnnnnnnnnnnnnnnnnnnnnnnnnnnnnnnnnnnnnnnnnnnnnnnnnnnnnnnnnnnnnnnnnnnnnnnnnnnnnnnnnnnnnnnnnnnnnnnnnnnnnnnnnnnnnnnnnnnnnnnnnnnnnnnnnnnnnnnnnnnnnnnnnnnnnnnnnnnnnnnnnnnnnnnnnnnnnnnnnnnnnnnnnnnnnnnnnnnnnnnnnnnnnnnnnnnnnnnnnnnnnnnnnnnnnnnnnnnnnnnnnnnnnnnnnnnnnnnnnnnnnnnnnnnnnnnnnnnnnnnnnnnnnnnnnnnnnnnnnnnnnnnnnnnnnnnnnnnnnnnnnnnnnnnnnnnnnnnnnnnnnnnnnnnnnnnnnnnnnnnnnnnnnnnnnnnnnnnnnnnnnnnnnnnnnnnnnnnnnnnnnnnnnnnnnnnnnnnnnnnnnnnnnnnnnnnnnnnnnnnnnnnnnnnnnnnnnnnnnnnnnnnnnnnnnnnnnnnnnnnnnnnnnnnnnnnnnnnnnnnnnnnnnnnnnnnnnnnnnnnnnnnnnnnnnnnnnnnnnnnnnnnnnnnnnnnnnnnnnnnnnnnnnnnnnnnnnnnnnnnnnnnnnnnnnnnnnnnnnnnnnnnnnnnnnnnnnnnnnnnnnnnnnnnnnnnnnnnnnnnnnnnnnnnnnnnnnnnnnnnnnnnnnnnnnnnnnnnnnnnnnnnnnnnnnnnnnnnnnnnnnnnnnnnnnnnnnnnnnnnnnnnnnnnnnnnnnnnnnnnnnnnnnnnnnnnnnnnnnnnnnnnnnnnnnnnnnnnnnnnnnnnnnnnnnnnnnnnnnnnnnnnnnnnnnnnnnnnnnnnnnnnnnnnnnnnnnnnnnnnnnnnnnnnnnnnnnnnnnnnnnnnnnnnnnnnnnnnnnnnnnnnnnnnnnnnnnnnnnnnnnnnnnnnnnnnnnnnnnnnnnnnnnnnnnnnnnnnnnnnnnnnnnnnnnnnnnnnnnnnnnnnnnnnnnnnnnnnnnnnnnnnnnnnnnnnnnnnnnnnnnnnnnnnnnnnnnnnnnnnnnnnnnnnnnnnnnnnnnnnnnnnnnnnnnnnnnnnnnnnnnnnnnnnnnnnnnnnnnnnnnnnnnnnnnnnnnnnnnnnnnnnnnnnnnnnnnnnnnnnnnnnnnnnnnnnnnnnnnnnnnnnnnnnnnnnnnnnnnnnnnnnnnnnnnnnnnnnnnnnnnnnnnnnnnnnnnnnnnnnnnnnnnnnnnnnnnnnnnnnnnnnnnnnnnnnnnnnnnnnnnnnnnnnnnnnnnnnnnnnnnnnnnnnnnnnnnnnnnnnnnnnnnnnnnnnnnnnnnnnnnnnnnnnnnnnnnnnnnnnnnnnnnnnnnnnnnnnnnnnnnnnnnnnnnnnnnnnnnnnnnnnnnnnnnnnnnnnnnnnnnnnnnnnnnnnnnnnnnnnnnnnnnnnnnnnnnnnnnnnnnnnnnnnnnnnnnnnnnnnnnnnnnnnnnnnnnnnnnnnnnnnnnnnnnnnnnnnnnnnnnnnnnnnnnnnnnnnnnnnnnnnnnnnnnnnnnnnnnnnnnnnnnnnnnnnnnnnnnnnnnnnnnnnnnnnnnnnnnnnnnnnnnnnnnnnnnnnnnnnnnnnnnnnnnnnnnnnnnnnnnnnnnnnnnnnnnnnnnnnnnnnnnnnnnnnnnnnnnnnnnnnnnnnnnnnnnnnnnnnnnnnnnnnnnnnnnnnnnnnnnnnnnnnnnnnnnnnnnnnnnnnnnnnnnnnnnnnnnnnnnnnnnnnnnnnnnnnnnnnnnnnnnnnnnnnnnnnnnnnnnnnnnnnnnnnnnnnnnnnnnnnnnnnnnnnnnnnnnnnnnnnnnnnnnnnnnnnnnnnnnnnnnnnnnnnnnnnnnnnnnnnnnnnnnnnnnnnnnnnnnnnnnnnnnnnnnnnnnnnnnnnnnnnnnnnnnnnnnnnnnnnnnnnnnnnnnnnnnnnnnnnnnnnnnnnnnnnnnnnnnnnnnnnnnnnnnnnnnnnnnnnnnnnnnnnnnnnnnnnnnnnnnnnnnnnnnnnnnnnnnnnnnnnnnnnnnnnnnnnnnnnnnnnnnnnnnnnnnnnnnnnnnnnnnnnnnnnnnnnnnnnnnnnnnnnnnnnnnnnnnnnnnnnnnnnnnnnnnnnnnnnnnnnnnnnnnnnnnnnnnnnnnnnnnnnnnnnnnnnnnnnnnnnnnnnnnnnnnnnnnnnnnnnnnnnnnnnnnnnnnnnnnnnnnnnnnnnnnnnnnnnnnnnnnnnnnnnnnnnnnnnnnnnnnnnnnnnnnnnnnnnnnnnnnnnnnnnnnnnnnnnnnnnnnnnnnnnnnnnnnnnnnnnnnnnnnnnnnnnnnnnnnnnnnnnnnnnnnnnnnnnnnnnnnnnnnnnnnnnnnnnnnnnnnnnnnnnnnnnnnnnnnnnnnnnnnnnnnnnnnnnnnnnnnnnnnnnnnnnnnnnnnnnnnnnnnnnnnnnnnnnnnnnnnnnnnnnnnnnnnnnnnnnnnnnnnnnnnnnnnnnnnnnnnnnnnnnnnnnnnnnnnnnnnnnnnnnnnnnnnnnnnnnnnnnnnnnnnnnnnnnnnnnnnnnnnnnnnnnnnnnnnnnnnnnnnnnnnnnnnnnnnnnnnnnnnnnnnnnnnnnnnnnnnnnnnnnnnnnnnnnnnnnnnnnnnnnnnnnnnnnnnnnnnnnnnnnnnnnnnnnnnnnnnnnnnnnnnnnnnnnnnnnnnnnnnnnnnnnnnnnnnnnnnnnnnnnnnnnnnnnnnnnnnnnnnnnnnnnnnnnnnnnnnnnnnnnnnnnnnnnnnnnnnnnnnnnnnnnnnnnnnnnnnnnnnnnnnnnnnnnnnnnnnnnnnnnnnnnnnnnnnnnnnnnnnnnnnnnnnnnnnnnnnnnnnnnnnnnnnnnnnnnnnnnnnnnnnnnnnnnnnnnnnnnnnnnnnnnnnnnnnnnnnnnnnnnnnnnnnnnnnnnnnnnnnnnnnnnnnnnnnnnnnnnnnnnnnnnnnnnnnnnnnnnnnnnnnnnnnnnnnnnnnnnnnnnnnnnnnnnnnnnnnnnnnnnnnnnnnnnnnnnnnnnnnnnnnnnnnnnnnnnnnnnnnnnnnnnnnnnnnnnnnnnnnnnnnnnnnnnnnnnnnnnnnnnnnnnnnnnnnnnnnnnnnnnnnnnnnnnnnnnnnnnnnnnnnnnnnnnnnnnnnnnnnnnnnnnnnnnnnnnnnnnnnnnnnnnnnnnnnnnnnnnnnnnnnnnnnnnnnnnnnnnnnnnnnnnnnnnnnnnnnnnnnnnnnnnnnnnnnnnnnnnnnnnnnnnnnnnnnnnnnnnnnnnnnnnnnnnnnnnnnnnnnnnnnnnnnnnnnnnnnnnnnnnnnnnnnnnnnnnnnnnnnnnnnnnnnnnnnnnnnnnnnnnnnnnnnnnnnnnnnnnnnnnnnnnnnnnnnnnnnnnnnnnnnnnnnnnnnnnnnnnnnnnnnnnnnnnnnnnnnnnnnnnnnnnnnnnnnnnnnnnnnnnnnnnnnnnnnnnnnnnnnnnnnnnnnnnnnnnnnnnnnnnnnnnnnnnnnnnnnnnnnnnnnnnnnnnnnnnnnnnnnnnnnnnnnnnnnnnnnnnnnnnnnnnnnnnnnnnnnnnnnnnnnnnnnnnnnnnnnnnnnnnnnnnnnnnnnnnnnnnnnnnnnnnnnnnnnnnnnnnnnnnnnnnnnnnnnnnnnnnnnnnnnnnnnnnnnnnnnnnnnnnnnnnnnnnnnnnnnnnnnnnnnnnnnnnnnnnnnnnnnnnnnnnnnnnnnnnnnnnnnnnnnnnnnnnnnnnnnnnnnnnnnnnnnnnnnnnnnnnnnnnnnnnnnnnnnnnnnnnnnnnnnnnnnnnnnnnnnnnnnnnnnnnnnnnnnnnnnnnnnnnnnnnnnnnnnnnnnnnnnnnnnnnnnnnnnnnnnnnnnnnnnnnnnnnnnnnnnnnnnnnnnnnnnnnnnnnnnnnnnnnnnnnnnnnnnnnnnnnnnnnnnnnnnnnnnnnnnnnnnnnnnnnnnnnnnnnnnnnnnnnnnnnnnnnnnnnnnnnnnnnnnnnnnnnnnnnnnnnnnnnnnnnnnnnnnnnnnnnnnnnnnnnnnnnnnnnnnnnnnnnnnnnnnnnnnnnnnnnnnnnnnnnnnnnnnnnnnnnnnnnnnnnnnnnnnnnnnnnnnnnnnnnnnnnnnnnnnnnnnnnnnnnnnnnnnnnnnnnnnnnnnnnnnnnnnnnnnnnnnnnnnnnnnnnnnnnnnnnnnnnnnnnnnnnnnnnnnnnnnnnnnnnnnnnnnnnnnnnnnnnnnnnnnnnnnnnnnnnnnnnnnnnnnnnnnnnnnnnnnnnnnnnnnnnnnnnnnnnnnnnnnnnnnnnnnnnnnnnnnnnnnnnnnnnnnnnnnnnnnnnnnnnnnnnnnnnnnnnnnnnnnnnnnnnnnnnnnnnnnnnnnnnnnnnnnnnnnnnnnnnnnnnnnnnnnnnnnnnnnnnnnnnnnnnnnnnnnnnnnnnnnnnnnnnnnnnnnnnnnnnnnnnnnnnnnnnnnnnnnnnnnnnnnnnnnnnnnnnnnnnnnnnnnnnnnnnnnnnnnnnnnnnnnnnnnnnnnnnnnnnnnnnnnnnnnnnnnnnnnnnnnnnnnnnnnnnnnnnnnnnnnnnnnnnnnnnnnnnnnnnnnnnnnnnnnnnnnnnnnnnnnnnnnnnnnnnnnnnnnnnnnnnnnnnnnnnnnnnnnnnnnnnnnnnnnnnnnnnnnnnnnnnnnnnnnnnnnnnnnnnnnnnnnnnnnnnnnnnnnnnnnnnnnnnnnnnnnnnnnnnnnnnnnnnnnnnnnnnnnnnnnnnnnnnnnnnnnnnnnnnnnnnnnnnnnnnnnnnnnnnnnnnnnnnnnnnnnnnnnnnnnnnnnnnnnnnnnnnnnnnnnnnnnnnnnnnnnnnnnnnnnnnnnnnnnnnnnnnnnnnnnnnnnnnnnnnnnnnnnnnnnnnnnnnnnnnnnnnnnnnnnnnnnnnnnnnnnnnnnnnnnnnnnnnnnnnnnnnnnnnnnnnnnnnnnnnnnnnnnnnnnnnnnnnnnnnnnnnnnnnnnnnnnnnnnnnnnnnnnnnnnnnnnnnnnnnnnnnnnnnnnnnnnnnnnnnnnnnnnnnnnnnnnnnnnnnnnnnnnnnnnnnnnnnnnnnnnnnnnnnnnnnnnnnnnnnnnnnnnnnnnnnnnnnnnnnnnnnnnnnnnnnnnnnnnnnnnnnnnnnnnnnnnnnnnnnnnnnnnnnnnnnnnnnnnnnnnnnnnnnnnnnnnnnnnnnnnnnnnnnnnnnnnnnnnnnnnnnnnnnnnnnnnnnnnnnnnnnnnnnnnnnnnnnnnnnnnnnnnnnnnnnnnnnnnnnnnnnnnnnnnnnnnnnnnnnnnnnnnnnnnnnnnnnnnnnnnnnnnnnnnnnnnnnnnnnnnnnnnnnnnnnnnnnnnnnnnnnnnnnnnnnnnnnnnnnnnnnnnnnnnnnnnnnnnnnnnnnnnnnnnnnnnnnnnnnnnnnnnnnnnnnnnnnnnnnnnnnnnnnnnnnnnnnnnnnnnnnnnnnnnnnnnnnnnnnnnnnnnnnnnnnnnnnnnnnnnnnnnnnnnnnnnnnnnnnnnnnnnnnnnnnnnnnnnnnnnnnnnnnnnnnnnnnnnnnnnnnnnnnnnnnnnnnnnnnnnnnnnnnnnnnnnnnnnnnnnnnnnnnnnnnnnnnnnnnnnnnnnnnnnnnnnnnnnnnnnnnnnnnnnnnnnnnnnnnnnnnnnnnnnnnnnnnnnnnnnnnnnnnnnnnnnnnnnnnnnnnnnnnnnnnnnnnnnnnnnnnnnnnnnnnnnnnnnnnnnnnnnnnnnnnnnnnnnnnnnnnnnnnnnnnnnnnnnnnnnnnnnnnnnnnnnnnnnnnnnnnnnnnnnnnnnnnnnnnnnnnnnnnnnnnnnnnnnnnnnnnnnnnnnnnnnnnnnnnnnnnnnnnnnnnnnnnnnnnnnnnnnnnnnnnnnnnnnnnnnnnnnnnnnnnnnnnnnnnnnnnnnnnnnnnnnnnnnnnnnnnnnnnnnnnnnnnnnnnnnnnnnnnnnnnnnnnnnnnnnnnnnnnnnnnnnnnnnnnnnnnnnnnnnnnnnnnnnnnnnnnnnnnnnnnnnnnnnnnnnnnnnnnnnnnnnnnnnnnnnnnnnnnnnnnnnnnnnnnnnnnnnnnnnnnnnnnnnnnnnnnnnnnnnnnnnnnnnnnnnnnnnnnnnnnnnnnnnnnnnnnnnnnnnnnnnnnnnnnnnnnnnnnnnnnnnnnnnnnnnnnnnnnnnnnnnnnnnnnnnnnnnnnnnnnnnnnnnnnnnnnnnnnnnnnnnnnnnnnnnnnnnnnnnnnnnnnnnnnnnnnnnnnnnnnnnnnnnnnnnnnnnnnnnnnnnnnnnnnnnnnnnnnnnnnnnnnnnnnnnnnnnnnnnnnnnnnnnnnnnnnnnnnnnnnnnnnnnnnnnnnnnnnnnnnnnnnnnnnnnnnnnnnnnnnnnnnnnnnnnnnnnnnnnnnnnnnnnnnnnnnnnnnnnnnnnnnnnnnnnnnnnnnnnnnnnnnnnnnnnnnnnnnnnnnnnnnnnnnnnnnnnnnnnnnnnnnnnnnnnnnnnnnnnnnnnnnnnnnnnnnnnnnnnnnnnnnnnnnnnnnnnnnnnnnnnnnnnnnnnnnnnnnnnnnnnnnnnnnnnnnnnnnnnnnnnnnnnnnnnnnnnnnnnnnnnnnnnnnnnnnnnnnnnnnnnnnnnnnnnnnnnnnnnnnnnnnnnnnnnnnnnnnnnnnnnnnnnnnnnnnnnnnnnnnnnnnnnnnnnnnnnnnnnnnnnnnnnnnnnnnnnnnnnnnnnnnnnnnnnnnnnnnnnnnnnnnnnnnnnnnnnnnnnnnnnnnnnnnnnnnnnnnnnnnnnnnnnnnnnnnnnnnnnnnnnnnnnnnnnnnnnnnnnnnnnnnnnnnnnnnnnnnnnnnnnnnnnnnnnnnnnnnnnnnnnnnnnnnnnnnnnnnnnnnnnnnnnnnnnnnnnnnnnnnnnnnnnnnnnnnnnnnnnnnnnnnnnnnnnnnnnnnnnnnnnnnnnnnnnnnnnnnnnnnnnnnnnnnnnnnnnnnnnnnnnnnnnnnnnnnnnnnnnnnnnnnnnnnnnnnnnnnnnnnnnnnnnnnnnnnnnnnnnnnnnnnnnnnnnnnnnnnnnnnnnnnnnnnnnnnnnnnnnnnnnnnnnnnnnnnnnnnnnnnnnnnnnnnnnnnnnnnnnnnnnnnnnnnnnnnnnnnnnnnnnnnnnnnnnnnnnnnnnnnnnnnnnnnnnnnnnnnnnnnnnnnnnnnnnnnnnnnnnnnnnnnnnnnnnnnnnnnnnnnnnnnnnnnnnnnnnnnnnnnnnnnnnnnnnnnnnnnnnnnnnnnnnnnnnnnnnnnnnnnnnnnnnnnnnnnnnnnnnnnnnnnnnnnnnnnnnnnnnnnnnnnnnnnnnnnnnnnnnnnnnnnnnnnnnnnnnnnnnnnnnnnnnnnnnnnnnnnnnnnnnnnnnnnnnnnnnnnnnnnnnnnnnnnnnnnnnnnnnnnnnnnnnnnnnnnnnnnnnnnnnnnnnnnnnnnnnnnnnnnnnnnnnnnnnnnnnnnnnnnnnnnnnnnnnnnnnnnnnnnnnnnnnnnnnnnnnnnnnnnnnnnnnnnnnnnnnnnnnnnnnnnnnnnnnnnnnnnnnnnnnnnnnnnnnnnnnnnnnnnnnnnnnnnnnnnnnnnnnnnnnnnnnnnnnnnnnnnnnnnnnnnnnnnnnnnnnnnnnnnnnnnnnnnnnnnnnnnnnnnnnnnnnnnnnnnnnnnnnnnnnnnnnnnnnnnnnnnnnnnnnnnnnnnnnnnnnnnnnnnnnnnnnnnnnnnnnnnnnnnnnnnnnnnnnnnnnnnnnnnnnnnnnnnnnnnnnnnnnnnnnnnnnnnnnnnnnnnnnnnnnnnnnnnnnnnnnnnnnnnnnnnnnnnnnnnnnnnnnnnnnnnnnnnnnnnnnnnnnnnnnnnnnnnnnnnnnnnnnnnnnnnnnnnnnnnnnnnnnnnnnnnnnnnnnnnnnnnnnnnnnnnnnnnnnnnnnnnnnnnnnnnnnnnnnnnnnnnnnnnnnnnnnnnnnnnnnnnnnnnnnnnnnnnnnnnnnnnnnnnnnnnnnnnnnnnnnnnnnnnnnnnnnnnnnnnnnnnnnnnnnnnnnnnnnnnnnnnnnnnnnnnnnnnnnnnnnnnnnnnnnnnnnnnnnnnnnnnnnnnnnnnnnnnnnnnnnnnnnnnnnnnnnnnnnnnnnnnnnnnnnnnnnnnnnnnnnnnnnnnnnnnnnnnnnnnnnnnnnnnnnnnnnnnnnnnnnnnnnnnnnnnnnnnnnnnnnnnnnnnnnnnnnnnnnnnnnnnnnnnnnnnnnnnnnnnnnnnnnnnnnnnnnnnnnnnnnnnnnnnnnnnnnnnnnnnnnnnnnnnnnnnnnnnnnnnnnnnnnnnnnnnnnnnnnnnnnnnnnnnnnnnnnnnnnnnnnnnnnnnnnnnnnnnnnnnnnnnnnnnnnnnnnnnnnnnnnnnnnnnnnnnnnnnnnnnnnnnnnnnnnnnnnnnnnnnnnnnnnnnnnnnnnnnnnnnnnnnnnnnnnnnnnnnnnnnnnnnnnnnnnnnnnnnnnnnnnnnnnnnnnnnnnnnnnnnnnnnnnnnnnnnnnnnnnnnnnnnnnnnnnnnnnnnnnnnnnnnnnnnnnnnnnnnnnnnnnnnnnnnnnnnnnnnnnnnnnnnnnnnnnnnnnnnnnnnnnnnnnnnnnnnnnnnnnnnnnnnnnnnnnnnnnnnnnnnnnnnnnnnnnnnnnnnnnnnnnnnnnnnnnnnnnnnnnnnnnnnnnnnnnnnnnnnnnnnnnnnnnnnnnnnnnnnnnnnnnnnnnnnnnnnnnnnnnnnnnnnnnnnnnnnnnnnnnnnnnnnnnnnnnnnnnnnnnnnnnnnnnnnnnnnnnnnnnnnnnnnnnnnnnnnnnnnnnnnnnnnnnnnnnnnnnnnnnnnnnnnnnnnnnnnnnnnnnnnnnnnnnnnnnnnnnnnnnnnnnnnnnnnnnnnnnnnnnnnnnnnnnnnnnnnnnnnnnnnnnnnnnnnnnnnnnnnnnnnnnnnnnnnnnnnnnnnnnnnnnnnnnnnnnnnnnnnnnnnnnnnnnnnnnnnnnnnnnnnnnnnnnnnnnnnnnnnnnnnnnnnnnnnnnnnnnnnnnnnnnnnnnnnnnnnnnnnnnnnnnnnnnnnnnnnnnnnnnnnnnnnnnnnnnnnnnnnnnnnnnnnnnnnnnnnnnnnnnnnnnnnnnnnnnnnnnnnnnnnnnnnnnnnnnnnnnnnnnnnnnnnnnnnnnnnnnnnnnnnnnnnnnnnnnnnnnnnnnnnnnnnnnnnnnnnnnnnnnnnnnnnnnnnnnnnnnnnnnnnnnnnnnnnnnnnnnnnnnnnnnnnnnnnnnnnnnnnnnnnnnnnnnnnnnnnnnnnnnnnnnnnnnnnnnnnnnnnnnnnnnnnnnnnnnnnnnnnnnnnnnnnnnnnnnnnnnnnnnnnnnnnnnnnnnnnnnnnnnnnnnnnnnnnnnnnnnnnnnnnnnnnnnnnnnnnnnnnnnnnnnnnnnnnnnnnnnnnnnnnnnnnnnnnnnnnnnnnnnnnnnnnnnnnnnnnnnnnnnnnnnnnnnnnnnnnnnnnnnnnnnnnnnnnnnnnnnnnnnnnnnnnnnnnnnnnnnnnnnnnnnnnnnnnnnnnnnnnnnnnnnnnnnnnnnnnnnnnnnnnnnnnnnnnnnnnnnnnnnnnnnnnnnnnnnnnnnnnnnnnnnnnnnnnnnnnnnnnnnnnnnnnnnnnnnnnnnnnnnnnnnnnnnnnnnnnnnnnnnnnnnnnnnnnnnnnnnnnnnnnnnnnnnnnnnnnnnnnnnnnnnnnnnnnnnnnnnnnnnnnnnnnnnnnnnnnnnnnnnnnnnnnnnnnnnnnnnnnnnnnnnnnnnnnnnnnnnnnnnnnnnnnnnnnnnnnnnnnnnnnnnnnnnnnnnnnnnnnnnnnnnnnnnnnnnnnnnnnnnnnnnnnnnnnnnnnnnnnnnnnnnnnnnnnnnnnnnnnnnnnnnnnnnnnnnnnnnnnnnnnnnnnnnnnnnnnnnnnnnnnnnnnnnnnnnnnnnnnnnnnnnnnnnnnnnnnnnnnnnnnnnnnnnnnnnnnnnnnnnnnnnnnnnnnnnnnnnnnnnnnnnnnnnnnnnnnnnnnnnnnnnnnnnnnnnnnnnnnnnnnnnnnnnnnnnnnnnnnnnnnnnnnnnnnnnnnnnnnnnnnnnnnnnnnnnnnnnnnnnnnnnnnnnnnnnnnnnnnnnnnnnnnnnnnnnnnnnnnnnnnnnnnnnnnnnnnnnnnnnnnnnnnnnnnnnnnnnnnnnnnnnnnnnnnnnnnnnnnnnnnnnnnnnnnnnnnnnnnnnnnnnnnnnnnnnnnnnnnnnnnnnnnnnnnnnnnnnnnnnnnnnnnnnnnnnnnnnnnnnnnnnnnnnnnnnnnnnnnnnnnnnnnnnnnnnnnnnnnnnnnnnnnnnnnnnnnnnnnnnnnnnnnnnnnnnnnnnnnnnnnnnnnnnnnnnnnnnnnnnnnnnnnnnnnnnnnnnnnnnnnnnnnnnnnnnnnnnnnnnnnnnnnnnnnnnnnnnnnnnnnnnnnnnnnnnnnnnnnnnnnnnnnnnnnnnnnnnnnnnnnnnnnnnnnnnnnnnnnnnnnnnnnnnnnnnnnnnnnnnnnnnnnnnnnnnnnnnnnnnnnnnnnnnnnnnnnnnnnnnnnnnnnnnnnnnnnnnnnnnnnnnnnnnnnnnnnnnnnnnnnnnnnnnnnnnnnnnnnnnnnnnnnnnnnnnnnnnnnnnnnnnnnnnnnnnnnnnnnnnnnnnnnnnnnnnnnnnnnnnnnnnnnnnnnnnnnnnnnnnnnnnnnnnnnnnnnnnnnnnnnnnnnnnnnnnnnnnnnnnnnnnnnnnnnnnnnnnnnnnnnnnnnnnnnnnnnnnnnnnnnnnnnnnnnnnnnnnnnnnnnnnnnnnnnnnnnnnnnnnnnnnnnnnnnnnnnnnnnnnnnnnnnnnnnnnnnnnnnnnnnnnnnnnnnnnnnnnnnnnnnnnnnnnnnnnnnnnnnnnnnnnnnnnnnnnnnnnnnnnnnnnnnnnnnnnnnnnnnnnnnnnnnnnnnnnnnnnnnnnnnnnnnnnnnnnnnnnnnnnnnnnnnnnnnnnnnnnnnnnnnnnnnnnnnnnnnnnnnnnnnnnnnnnnnnnnnnnnnnnnnnnnnnnnnnnnnnnnnnnnnnnnnnnnnnnnnnnnnnnnnnnnnnnnnnnnnnnnnnnnnnnnnnnnnnnnnnnnnnnnnnnnnnnnnnnnnnnnnnnnnnnnnnnnnnnnnnnnnnnnnnnnnnnnnnnnnnnnnnnnnnnnnnnnnnnnnnnnnnnnnnnnnnnnnnnnnnnnnnnnnnnnnnnnnnnnnnnnnnnnnnnnnnnnnnnnnnnnnnnnnnnnnnnnnnnnnnnnnnnnnnnnnnnnnnnnnnnnnnnnnnnnnnnnnnnnnnnnnnnnnnnnnnnnnnnnnnnnnnnnnnnnnnnnnnnnnnnnnnnnnnnnnnnnnnnnnnnnnnnnnnnnnnnnnnnnnnnnnnnnnnnnnnnnnnnnnnnnnnnnnnnnnnnnnnnnnnnnnnnnnnnnnnnnnnnnnnnnnnnnnnnnnnnnnnnnnnnnnnnnnnnnnnnnnnnnnnnnnnnnnnnnnnnnnnnnnnnnnnnnnnnnnnnnnnnnnnnnnnnnnnnnnnnnnnnnnnnnnnnnnnnnnnnnnnnnnnnnnnnnnnnnnnnnnnnnnnnnnnnnnnnnnnnnnnnnnnnnnnnnnnnnnnnnnnnnnnnnnnnnnnnnnnnnnnnnnnnnnnnnnnnnnnnnnnnnnnnnnnnnnnnnnnnnnnnnnnnnnnnnnnnnnnnnnnnnnnnnnnnnnnnnnnnnnnnnnnnnnnnnnnnnnnnnnnnnnnnnnnnnnnnnnnnnnnnnnnnnnnnnnnnnnnnnnnnnnnnnnnnnnnnnnnnnnnnnnnnnnnnnnnnnnnnnnnnnnnnnnnnnnnnnnnnnnnnnnnnnnnnnnnnnnnnnnnnnnnnnnnnnnnnnnnnnnnnnnnnnnnnnnnnnnnnnnnnnnnnnnnnnnnnnnnnnnnnnnnnnnnnnnnnnnnnnnnnnnnnnnnnnnnnnnnnnnnnnnnnnnnnnnnnnnnnnnnnnnnnnnnnnnnnnnnnnnnnnnnnnnnnnnnnnnnnnnnnnnnnnnnnnnnnnnnnnnnnnnnnnnnnnnnnnnnnnnnnnnnnnnnnnnnnnnnnnnnnnnnnnnnnnnnnnnnnnnnnnnnnnnnnnnnnnnnnnnnnnnnnnnnnnnnnnnnnnnnnnnnnnnnnnnnnnnnnnnnnnnnnnnnnnnnnnnnnnnnnnnnnnnnnnnnnnnnnnnnnnnnnnnnnnnnnnnnnnnnnnnnnnnnnnnnnnnnnnnnnnnnnnnnnnnnnnnnnnnnnnnnnnnnnnnnnnnnnnnnnnnnnnnnnnnnnnnnnnnnnnnnnnnnnnnnnnnnnnnnnnnnnnnnnnnnnnnnnnnnnnnnnnnnnnnnnnnnnnnnnnnnnnnnnnnnnnnnnnnnnnnnnnnnnnnnnnnnnnnnnnnnnnnnnnnnnnnnnnnnnnnnnnnnnnnnnnnnnnnnnnnnnnnnnnnnnnnnnnnnnnnnnnnnnnnnnnnnnnnnnnnnnnnnnnnnnnnnnnnnnnnnnnnnnnnnnnnnnnnnnnnnnnnnnnnnnnnnnnnnnnnnnnnnnnnnnnnnnnnnnnnnnnnnnnnnnnnnnnnnnnnnnnnnnnnnnnnnnnnnnnnnnnnnnnnnnnnnnnnnnnnnnnnnnnnnnnnnnnnnnnnnnnnnnnnnnnnnnnnnnnnnnnnnnnnnnnnnnnnnnnnnnnnnnnnnnnnnnnnnnnnnnnnnnnnnnnnnnnnnnnnnnnnnnnnnnnnnnnnnnnnnnnnnnnnnnnnnnnnnnnnnnnnnnnnnnnnnnnnnnnnnnnnnnnnnnnnnnnnnnnnnnnnnnnnnnnnnnnnnnnnnnnnnnnnnnnnnnnnnnnnnnnnnnnnnnnnnnnnnnnnnnnnnnnnnnnnnnnnnnnnnnnnnnnnnnnnnnnnnnnnnnnnnnnnnnnnnnnnnnnnnnnnnnnnnnnnnnnnnnnnnnnnnnnnnnnnnnnnnnnnnnnnnnnnnnnnnnnnnnnnnnnnnnnnnnnnnnnnnnnnnnnnnnnnnnnnnnnnnnnnnnnnnnnnnnnnnnnnnnnnnnnnnnnnnnnnnnnnnnnnnnnnnnnnnnnnnnnnnnnnnnnnnnnnnnnnnnnnnnnnnnnnnnnnnnnnnnnnnnnnnnnnnnnnnnnnnnnnnnnnnnnnnnnnnnnnnnnnnnnnnnnnnnnnnnnnnnnnnnnnnnnnnnnnnnnnnnnnnnnnnnnnnnnnnnnnnnnnnnnnnnnnnnnnnnnnnnnnnnnnnnnnnnnnnnnnnnnnnnnnnnnnnnnnnnnnnnnnnnnnnnnnnnnnnnnnnnnnnnnnnnnnnnnnnnnnnnnnnnnnnnnnnnnnnnnnnnnnnnnnnnnnnnnnnnnnnnnnnnnnnnnnnnnnnnnnnnnnnnnnnnnnnnnnnnnnnnnnnnnnnnnnnnnnnnnnnnnnnnnnnnnnnnnnnnnnnnnnnnnnnnnnnnnnnnnnnnnnnnnnnnnnnnnnnnnnnnnnnnnnnnnnnnnnnnnnnnnnnnnnnnnnnnnnnnnnnnnnnnnnnnnnnnnnnnnnnnnnnnnnnnnnnnnnnnnnnnnnnnnnnnnnnnnnnnnnnnnnnnnnnnnnnnnnnnnnnnnnnnnnnnnnnnnnnnnnnnnnnnnnnnnnnnnnnnnnnnnnnnnnnnnnnnnnnnnnnnnnnnnnnnnnnnnnnnnnnnnnnnnnnnnnnnnnnnnnnnnnnnnnnnnnnnnnnnnnnnnnnnnnnnnnnnnnnnnnnnnnnnnnnnnnnnnnnnnnnnnnnnnnnnnnnnnnnnnnnnnnnnnnnnnnnnnnnnnnnnnnnnnnnnnnnnnnnnnnnnnnnnnnnnnnnnnnnnnnnnnnnnnnnnnnnnnnnnnnnnnnnnnnnnnnnnnnnnnnnnnnnnnnnnnnnnnnnnnnnnnnnnnnnnnnnnnnnnnnnnnnnnnnnnnnnnnnnnnnnnnnnnnnnnnnnnnnnnnnnnnnnnnnnnnnnnnnnnnnnnnnnnnnnnnnnnnnnnnnnnnnnnnnnnnnnnnnnnnnnnnnnnnnnnnnnnnnnnnnnnnnnnnnnnnnnnnnnnnnnnnnnnnnnnnnnnnnnnnnnnnnnnnnnnnnnnnnnnnnnnnnnnnnnnnnnnnnnnnnnnnnnnnnnnnnnnnnnnnnnnnnnnnnnnnnnnnnnnnnnnnnnnnnnnnnnnnnnnnnnnnnnnnnnnnnnnnnnnnnnnnnnnnnnnnnnnnnnnnnnnnnnnnnnnnnnnnnnnnnnnnnnnnnnnnnnnnnnnnnnnnnnnnnnnnnnnnnnnnnnnnnnnnnnnnnnnnnnnnnnnnnnnnnnnnnnnnnnnnnnnnnnnnnnnnnnnnnnnnnnnnnnnnnnnnnnnnnnnnnnnnnnnnnnnnnnnnnnnnnnnnnnnnnnnnnnnnnnnnnnnnnnnnnnnnnnnnnnnnnnnnnnnnnnnnnnnnnnnnnnnnnnnnnnnnnnnnnnnnnnnnnnnnnnnnnnnnnnnnnnnnnnnnnnnnnnnnnnnnnnnnnnnnnnnnnnnnnnnnnnnnnnnnnnnnnnnnnnnnnnnnnnnnnnnnnnnnnnnnnnnnnnnnnnnnnnnnnnnnnnnnnnnnnnnnnnnnnnnnnnnnnnnnnnnnnnnnnnnnnnnnnnnnnnnnnnnnnnnnnnnnnnnnnnnnnnnnnnnnnnnnnnnnnnnnnnnnnnnnnnnnnnnnnnnnnnnnnnnnnnnnnnnnnnnnnnnnnnnnnnnnnnnnnnnnnnnnnnnnnnnnnnnnnnnnnnnnnnnnnnnnnnnnnnnnnnnnnnnnnnnnnnnnnnnnnnnnnnnnnnnnnnnnnnnnnnnnnnnnnnnnnnnnnnnnnnnnnnnnnnnnnnnnnnnnnnnnnnnnnnnnnnnnnnnnnnnnnnnnnnnnnnnnnnnnnnnnnnnnnnnnnnnnnnnnnnnnnnnnnnnnnnnnnnnnnnnnnnnnnnnnnnnnnnnnnnnnnnnnnnnnnnnnnnnnnnnnnnnnnnnnnnnnnnnnnnnnnnnnnnnnnnnnnnnnnnnnnnnnnnnnnnnnnnnnnnnnnnnnnnnnnnnnnnnnnnnnnnnnnnnnnnnnnnnnnnnnnnnnnnnnnnnnnnnnnnnnnnnnnnnnnnnnnnnnnnnnnnnnnnnnnnnnnnnnnnnnnnnnnnnnnnnnnnnnnnnnnnnnnnnnnnnnnnnnnnnnnnnnnnnnnnnnnnnnnnnnnnnnnnnnnnnnnnnnnnnnnnnnnnnnnnnnnnnnnnnnnnnnnnnnnnnnnnnnnnnnnnnnnnnnnnnnnnnnnnnnnnnnnnnnnnnnnnnnnnnnnnnnnnnnnnnnnnnnnnnnnnnnnnnnnnnnnnnnnnnnnnnnnnnnnnnnnnnnnnnnnnnnnnnnnnnnnnnnnnnnnnnnnnnnnnnnnnnnnnnnnnnnnnnnnnnnnnnnnnnnnnnnnnnnnnnnnnnnnnnnnnnnnnnnnnnnnnnnnnnnnnnnnnnnnnnnnnnnnnnnnnnnnnnnnnnnnnnnnnnnnnnnnnnnnnnnnnnnnnnnnnnnnnnnnnnnnnnnnnnnnnnnnnnnnnnnnnnnnnnnnnnnnnnnnnnnnnnnnnnnnnnnnnnnnnnnnnnnnnnnnnnnnnnnnnnnnnnnnnnnnnnnnnnnnnnnnnnnnnnnnnnnnnnnnnnnnnnnnnnnnnnnnnnnnnnnnnnnnnnnnnnnnnnnnnnnnnnnnnnnnnnnnnnnnnnnnnnnnnnnnnnnnnnnnnnnnnnnnnnnnnnnnnnnnnnnnnnnnnnnnnnnnnnnnnnnnnnnnnnnnnnnnnnnnnnnnnnnnnnnnnnnnnnnnnnnnnnnnnnnnnnnnnnnnnnnnnnnnnnnnnnnnnnnnnnnnnnnnnnnnnnnnnnnnnnnnnnnnnnnnnnnnnnnnnnnnnnnnnnnnnnnnnnnnnnnnnnnnnnnnnnnnnnnnnnnnnnnnnnnnnnnnnnnnnnnnnnnnnnnnnnnnnnnnnnnnnnnnnnnnnnnnnnnnnnnnnnnnnnnnnnnnnnnnnnnnnnnnnnnnnnnnnnnnnnnnnnnnnnnnnnnnnnnnnnnnnnnnnnnnnnnnnnnnnnnnnnnnnnnnnnnnnnnnnnnnnnnnnnnnnnnnnnnnnnnnnnnnnnnnnnnnnnnnnnnnnnnnnnnnnnnnnnnnnnnnnnnnnnnnnnnnnnnnnnnnnnnnnnnnnnnnnnnnnnnnnnnnnnnnnnnnnnnnnnnnnnnnnnnnnnnnnnnnnnnnnnnnnnnnnnnnnnnnnnnnnnnnnnnnnnnnnnnnnnnnnnnnnnnnnnnnnnnnnnnnnnnnnnnnnnnnnnnnnnnnnnnnnnnnnnnnnnnnnnnnnnnnnnnnnnnnnnnnnnnnnnnnnnnnnnnnnnnnnnnnnnnnnnnnnnnnnnnnnnnnnnnnnnnnnnnnnnnnnnnnnnnnnnnnnnnnnnnnnnnnnnnnnnnnnnnnnnnnnnnnnnnnnnnnnnnnnnnnnnnnnnnnnnnnnnnnnnnnnnnnnnnnnnnnnnnnnnnnnnnnnnnnnnnnnnnnnnnnnnnnnnnnnnnnnnnnnnnnnnnnnnnnnnnnnnnnnnnnnnnnnnnnnnnnnnnnnnnnnnnnnnnnnnnnnnnnnnnnnnnnnnnnnnnnnnnnnnnnnnnnnnnnnnnnnnnnnnnnnnnnnnnnnnnnnnnnnnnnnnnnnnnnnnnnnnnnnnnnnnnnnnnnnnnnnnnnnnnnnnnnnnnnnnnnnnnnnnnnnnnnnnnnnnnnnnnnnnnnnnnnnnnnnnnnnnnnnnnnnnnnnnnnnnnnnnnnnnnnnnnnnnnnnnnnnnnnnnnnnnnnnnnnnnnnnnnnnnnnnnnnnnnnnnnnnnnnnnnnnnnnnnnnnnnnnnnnnnnnnnnnnnnnnnnnnnnnnnnnnnnnnnnnnnnnnnnnnnnnnnnnnnnnnnnnnnnnnnnnnnnnnnnnnnnnnnnnnnnnnnnnnnnnnnnnnnnnnnnnnnnnnnnnnnnnnnnnnnnnnnnnnnnnnnnnnnnnnnnnnnnnnnnnnnnnnnnnnnnnnnnnnnnnnnnnnnnnnnnnnnnnnnnnnnnnnnnnnnnnnnnnnnnnnnnnnnnnnnnnnnnnnnnnnnnnnnnnnnnnnnnnnnnnnnnnnnnnnnnnnnnnnnnnnnnnnnnnnnnnnnnnnnnnnnnnnnnnnnnnnnnnnnnnnnnnnnnnnnnnnnnnnnnnnnnnnnnnnnnnnnnnnnnnnnnnnnnnnnnnnnnnnnnnnnnnnnnnnnnnnnnnnnnnnnnnnnnnnnnnnnnnnnnnnnnnnnnnnnnnnnnnnnnnnnnnnnnnnnnnnnnnnnnnnnnnnnnnnnnnnnnnnnnnnnnnnnnnnnnnnnnnnnnnnnnnnnnnnnnnnnnnnnnnnnnnnnnnnnnnnnnnnnnnnnnnnnnnnnnnnnnnnnnnnnnnnnnnnnnnnnnnnnnnnnnnnnnnnnnnnnnnnnnnnnnnnnnnnnnnnnnnnnnnnnnnnnnnnnnnnnnnnnnnnnnnnnnnnnnnnnnnnnnnnnnnnnnnnnnnnnnnnnnnnnnnnnnnnnnnnnnnnnnnnnnnnnnnnnnnnnnnnnnnnnnnnnnnnnnnnnnnnnnnnnnnnnnnnnnnnnnnnnnnnnnnnnnnnnnnnnnnnnnnnnnnnnnnnnnnnnnnnnnnnnnnnnnnnnnnnnnnnnnnnnnnnnnnnnnnnnnnnnnnnnnnnnnnnnnnnnnnnnnnnnnnnnnnnnnnnnnnnnnnnnnnnnnnnnnnnnnnnnnnnnnnnnnnnnnnnnnnnnnnnnnnnnnnnnnnnnnnnnnnnnnnnnnnnnnnnnnnnnnnnnnnnnnnnnnnnnnnnnnnnnnnnnnnnnnnnnnnnnnnnnnnnnnnnnnnnnnnnnnnnnnnnnnnnnnnnnnnnnnnnnnnnnnnnnnnnnnnnnnnnnnnnnnnnnnnnnnnnnnnnnnnnnnnnnnnnnnnnnnnnnnnnnnnnnnnnnnnnnnnnnnnnnnnnnnnnnnnnnnnnnnnnnnnnnnnnnnnnnnnnnnnnnnnnnnnnnnnnnnnnnnnnnnnnnnnnnnnnnnnnnnnnnnnnnnnnnnnnnnnnnnnnnnnnnnnnnnnnnnnnnnnnnnnnnnnnnnnnnnnnnnnnnnnnnnnnnnnnnnnnnnnnnnnnnnnnnnnnnnnnnnnnnnnnnnnnnnnnnnnnnnnnnnnnnnnnnnnnnnnnnnnnnnnnnnnnnnnnnnnnnnnnnnnnnnnnnnnnnnnnnnnnnnnnnnnnnnnnnnnnnnnnnnnnnnnnnnnnnnnnnnnnnnnnnnnnnnnnnnnnnnnnnnnnnnnnnnnnnnnnnnnnnnnnnnnnnnnnnnnnnnnnnnnnnnnnnnnnnnnnnnnnnnnnnnnnnnnnnnnnnnnnnnnnnnnnnnnnnnnnnnnnnnnnnnnnnnnnnnnnnnnnnnnnnnnnnnnnnnnnnnnnnnnnnnnnnnnnnnnnnnnnnnnnnnnnnnnnnnnnnnnnnnnnnnnnnnnnnnnnnnnnnnnnnnnnnnnnnnnnnnnnnnnnnnnnnnnnnnnnnnnnnnnnnnnnnnnnnnnnnnnnnnnnnnnnnnnnnnnnnnnnnnnnnnnnnnnnnnnnnnnnnnnnnnnnnnnnnnnnnnnnnnnnnnnnnnnnnnnnnnnnnnnnnnnnnnnnnnnnnnnnnnnnnnnnnnnnnnnnnnnnnnnnnnnnnnnnnnnnnnnnnnnnnnnnnnnnnnnnnnnnnnnnnnnnnnnnnnnnnnnnnnnnnnnnnnnnnnnnnnnnnnnnnnnnnnnnnnnnnnnnnnnnnnnnnnnnnnnnnnnnnnnnnnnnnnnnnnnnnnnnnnnnnnnnnnnnnnnnnnnnnnnnnnnnnnnnnnnnnnnnnnnnnnnnnnnnnnnnnnnnnnnnnnnnnnnnnnnnnnnnnnnnnnnnnnnnnnnnnnnnnnnnnnnnnnnnnnnnnnnnnnnnnnnnnnnnnnnnnnnnnnnnnnnnnnnnnnnnnnnnnnnnnnnnnnnnnnnnnnnnnnnnnnnnnnnnnnnnnnnnnnnnnnnnnnnnnnnnnnnnnnnnnnnnnnnnnnnnnnnnnnnnnnnnnnnnnnnnnnnnnnnnnnnnnnnnnnnnnnnnnnnnnnnnnnnnnnnnnnnnnnnnnnnnnnnnnnnnnnnnnnnnnnnnnnnnnnnnnnnnnnnnnnnnnnnnnnnnnnnnnnnnnnnnnnnnnnnnnnnnnnnnnnnnnnnnnnnnnnnnnnnnnnnnnnnnnnnnnnnnnnnnnnnnnnnnnnnnnnnnnnnnnnnnnnnnnnnnnnnnnnnnnnnnnnnnnnnnnnnnnnnnnnnnnnnnnnnnnnnnnnnnnnnnnnnnnnnnnnnnnnnnnnnnnnnnnnnnnnnnnnnnnnnnnnnnnnnnnnnnnnnnnnnnnnnnnnnnnnnnnnnnnnnnnnnnnnnnnnnnnnnnnnnnnnnnnnnnnnnnnnnnnnnnnnnnnnnnnnnnnnnnnnnnnnnnnnnnnnnnnnnnnnnnnnnnnnnnnnnnnnnnnnnnnnnnnnnnnnnnnnnnnnnnnnnnnnnnnnnnnnnnnnnnnnnnnnnnnnnnnnnnnnnnnnnnnnnnnnnnnnnnnnnnnnnnnnnnnnnnnnnnnnnnnnnnnnnnnnnnnnnnnnnnnnnnnnnnnnnnnnnnnnnnnnnnnnnnnnnnnnnnnnnnnnnnnnnnnnnnnnnnnnnnnnnnnnnnnnnnnnnnnnnnnnnnnnnnnnnnnnnnnnnnnnnnnnnnnnnnnnnnnnnnnnnnnnnnnnnnnnnnnnnnnnnnnnnnnnnnnnnnnnnnnnnnnnnnnnnnnnnnnnnnnnnnnnnnnnnnnnnnnnnnnnnnnnnnnnnnnnnnnnnnnnnnnnnnnnnnnnnnnnnnnnnnnnnnnnnnnnnnnnnnnnnnnnnnnnnnnnnnnnnnnnnnnnnnnnnnnnnnnnnnnnnnnnnnnnnnnnnnnnnnnnnnnnnnnnnnnnnnnnnnnnnnnnnnnnnnnnnnnnnnnnnnnnnnnnnnnnnnnnnnnnnnnnnnnnnnnnnnnnnnnnnnnnnnnnnnnnnnnnnnnnnnnnnnnnnnnnnnnnnnnnnnnnnnnnnnnnnnnnnnnnnnnnnnnnnnnnnnnnnnnnnnnnnnnnnnnnnnnnnnnnnnnnnnnnnnnnnnnnnnnnnnnnnnnnnnnnnnnnnnnnnnnnnnnnnnnnnnnnnnnnnnnnnnnnnnnnnnnnnnnnnnnnnnnnnnnnnnnnnnnnnnnnnnnnnnnnnnnnnnnnnnnnnnnnnnnnnnnnnnnnnnnnnnnnnnnnnnnnnnnnnnnnnnnnnnnnnnnnnnnnnnnnnnnnnnnnnnnnnnnnnnnnnnnnnnnnnnnnnnnnnnnnnnnnnnnnnnnnnnnnnnnnnnnnnnnnnnnnnnnnnnnnnnnnnnnnnnnnnnnnnnnnnnnnnnnnnnnnnnnnnnnnnnnnnnnnnnnnnnnnnnnnnnnnnnnnnnnnnnnnnnnnnnnnnnnnnnnnnnnnnnnnnnnnnnnnnnnnnnnnnnnnnnnnnnnnnnnnnnnnnnnnnnnnnnnnnnnnnnnnnnnnnnnnnnnnnnnnnnnnnnnnnnnnnnnnnnnnnnnnnnnnnnnnnnnnnnnnnnnnnnnnnnnnnnnnnnnnnnnnnnnnnnnnnnnnnnnnnnnnnnnnnnnnnnnnnnnnnnnnnnnnnnnnnnnnnnnnnnnnnnnnnnnnnnnnnnnnnnnnnnnnnnnnnnnnnnnnnnnnnnnnnnnnnnnnnnnnnnnnnnnnnnnnnnnnnnnnnnnnnnnnnnnnnnnnnnnnnnnnnnnnnnnnnnnnnnnnnnnnnnnnnnnnnnnnnnnnnnnnnnnnnnnnnnnnnnnnnnnnnnnnnnnnnnnnnnnnnnnnnnnnnnnnnnnnnnnnnnnnnnnnnnnnnnnnnnnnnnnnnnnnnnnnnnnnnnnnnnnnnnnnnnnnnnnnnnnnnnnnnnnnnnnnnnnnnnnnnnnnnnnnnnnnnnnnnnnnnnnnnnnnnnnnnnnnnnnnnnnnnnnnnnnnnnnnnnnnnnnnnnnnnnnnnnnnnnnnnnnnnnnnnnnnnnnnnnnnnnnnnnnnnnnnnnnnnnnnnnnnnnnnnnnnnnnnnnnnnnnnnnnnnnnnnnnnnnnnnnnnnnnnnnnnnnnnnnnnnnnnnnnnnnnnnnnnnnnnnnnnnnnnnnnnnnnnnnnnnnnnnnnnnnnnnnnnnnnnnnnnnnnnnnnnnnnnnnnnnnnnnnnnnnnnnnnnnnnnnnnnnnnnnnnnnnnnnnnnnnnnnnnnnnnnnnnnnnnnnnnnnnnnnnnnnnnnnnnnnnnnnnnnnnnnnnnnnnnnnnnnnnnnnnnnnnnnnnnnnnnnnnnnnnnnnnnnnnnnnnnnnnnnnnnnnnnnnnnnnnnnnnnnnnnnnnnnnnnnnnnnnnnnnnnnnnnnnnnnnnnnnnnnnnnnnnnnnnnnnnnnnnnnnnnnnnnnnnnnnnnnnnnnnnnnnnnnnnnnnnnnnnnnnnnnnnnnnnnnnnnnnnnnnnnnnnnnnnnnnnnnnnnnnnnnnnnnnnnnnnnnnnnnnnnnnnnnnnnnnnnnnnnnnnnnnnnnnnnnnnnnnnnnnnnnnnnnnnnnnnnnnnnnnnnnnnnnnnnnnnnnnnnnnnnnnnnnnnnnnnnnnnnnnnnnnnnnnnnnnnnnnnnnnnnnnnnnnnnnnnnnnnnnnnnnnnnnnnnnnnnnnnnnnnnnnnnnnnnnnnnnnnnnnnnnnnnnnnnnnnnnnnnnnnnnnnnnnnnnnnnnnnnnnnnnnnnnnnnnnnnnnnnnnnnnnnnnnnnnnnnnnnnnnnnnnnnnnnnnnnnnnnnnnnnnnnnnnnnnnnnnnnnnnnnnnnnnnnnnnnnnnnnnnnnnnnnnnnnnnnnnnnnnnnnnnnnnnnnnnnnnnnnnnnnnnnnnnnnnnnnnnnnnnnnnnnnnnnnnnnnnnnnnnnnnnnnnnnnnnnnnnnnnnnnnnnnnnnnnnnnnnnnnnnnnnnnnnnnnnnnnnnnnnnnnnnnnnnnnnnnnnnnnnnnnnnnnnnnnnnnnnnnnnnnnnnnnnnnnnnnnnnnnnnnnnnnnnnnnnnnnnnnnnnnnnnnnnnnnnnnnnnnnnnnnnnnnnnnnnnnnnnnnnnnnnnnnnnnnnnnnnnnnnnnnnnnnnnnnnnnnnnnnnnnnnnnnnnnnnnnnnnnnnnnnnnnnnnnnnnnnnnnnnnnnnnnnnnnnnnnnnnnnnnnnnnnnnnnnnnnnnnnnnnnnnnnnnnnnnnnnnnnnnnnnnnnnnnnnnnnnnnnnnnnnnnnnnnnnnnnnnnnnnnnnnnnnnnnnnnnnnnnnnnnnnnnnnnnnnnnnnnnnnnnnnnnnnnnnnnnnnnnnnnnnnnnnnnnnnnnnnnnnnnnnnnnnnnnnnnnnnnnnnnnnnnnnnnnnnnnnnnnnnnnnnnnnnnnnnnnnnnnnnnnnnnnnnnnnnnnnnnnnnnnnnnnnnnnnnnnnnnnnnnnnnnnnnnnnnnnnnnnnnnnnnnnnnnnnnnnnnnnnnnnnnnnnnnnnnnnnnnnnnnnnnnnnnnnnnnnnnnnnnnnnnnnnnnnnnnnnnnnnnnnnnnnnnnnnnnnnnnnnnnnnnnnnnnnnnnnnnnnnnnnnnnnnnnnnnnnnnnnnnnnnnnnnnnnnnnnnnnnnnnnnnnnnnnnnnnnnnnnnnnnnnnnnnnnnnnnnnnnnnnnnnnnnnnnnnnnnnnnnnnnnnnnnnnnnnnnnnnnnnnnnnnnnnnnnnnnnnnnnnnnnnnnnnnnnnnnnnnnnnnnnnnnnnnnnnnnnnnnnnnnnnnnnnnnnnnnnnnnnnnnnnnnnnnnnnnnnnnnnnnnnnnnnnnnnnnnnnnnnnnnnnnnnnnnnnnnnnnnnnnnnnnnnnnnnnnnnnnnnnnnnnnnnnnnnnnnnnnnnnnnnnnnnnnnnnnnnnnnnnnnnnnnnnnnnnnnnnnnnnnnnnnnnnnnnnnnnnnnnnnnnnnnnnnnnnnnnnnnnnnnnnnnnnnnnnnnnnnnnnnnnnnnnnnnnnnnnnnnnnnnnnnnnnnnnnnnnnnnnnnnnnnnnnnnnnnnnnnnnnnnnnnnnnnnnnnnnnnnnnnnnnnnnnnnnnnnnnnnnnnnnnnnnnnnnnnnnnnnnnnnnnnnnnnnnnnnnnnnnnnnnnnnnnnnnnnnnnnnnnnnnnnnnnnnnnnnnnnnnnnnnnnnnnnnnnnnnnnnnnnnnnnnnnnnnnnnnnnnnnnnnnnnnnnnnnnnnnnnnnnnnnnnnnnnnnnnnnnnnnnnnnnnnnnnnnnnnnnnnnnnnnnnnnnnnnnnnnnnnnnnnnnnnnnnnnnnnnnnnnnnnnnnnnnnnnnnnnnnnnnnnnnnnnnnnnnnnnnnnnnnnnnnnnnnnnnnnnnnnnnnnnnnnnnnnnnnnnnnnnnnnnnnnnnnnnnnnnnnnnnnnnnnnnnnnnnnnnnnnnnnnnnnnnnnnnnnnnnnnnnnnnnnnnnnnnnnnnnnnnnnnnnnnnnnnnnnnnnnnnnnnnnnnnnnnnnnnnnnnnnnnnnnnnnnnnnnnnnnnnnnnnnnnnnnnnnnnnnnnnnnnnnnnnnnnnnnnnnnnnnnnnnnnnnnnnnnnnnnnnnnnnnnnnnnnnnnnnnnnnnnnnnnnnnnnnnnnnnnnnnnnnnnnnnnnnnnnnnnnnnnnnnnnnnnnnnnnnnnnnnnnnnnnnnnnnnnnnnnnnnnnnnnnnnnnnnnnnnnnnnnnnnnnnnnnnnnnnnnnnnnnnnnnnnnnnnnnnnnnnnnnnnnnnnnnnnnnnnnnnnnnnnnnnnnnnnnnnnnnnnnnnnnnnnnnnnnnnnnnnnnnnnnnnnnnnnnnnnnnnnnnnnnnnnnnnnnnnnnnnnnnnnnnnnnnnnnnnnnnnnnnnnnnnnnnnnnnnnnnnnnnnnnnnnnnnnnnnnnnnnnnnnnnnnnnnnnnnnnnnnnnnnnnnnnnnnnnnnnnnnnnnnnnnnnnnnnnnnnnnnnnnnnnnnnnnnnnnnnnnnnnnnnnnnnnnnnnnnnnnnnnnnnnnnnnnnnnnnnnnnnnnnnnnnnnnnnnnnnnnnnnnnnnnnnnnnnnnnnnnnnnnnnnnnnnnnnnnnnnnnnnnnnnnnnnnnnnnnnnnnnnnnnnnnnnnnnnnnnnnnnnnnnnnnnnnnnnnnnnnnnnnnnnnnnnnnnnnnnnnnnnnnnnnnnnnnnnnnnnnnnnnnnnnnnnnnnnnnnnnnnnnnnnnnnnnnnnnnnnnnnnnnnnnnnnnnnnnnnnnnnnnnnnnnnnnnnnnnnnnnnnnnnnnnnnnnnnnnnnnnnnnnnnnnnnnnnnnnnnnnnnnnnnnnnnnnnnnnnnnnnnnnnnnnnnnnnnnnnnnnnnnnnnnnnnnnnnnnnnnnnnnnnnnnnnnnnnnnnnnnnnnnnnnnnnnnnnnnnnnnnnnnnnnnnnnnnnnnnnnnnnnnnnnnnnnnnnnnnnnnnnnnnnnnnnnnnnnnnnnnnnnnnnnnnnnnnnnnnnnnnnnnnnnnnnnnnnnnnnnnnnnnnnnnnnnnnnnnnnnnnnnnnnnnnnnnnnnnnnnnnnnnnnnnnnnnnnnnnnnnnnnnnnnnnnnnnnnnnnnnnnnnnnnnnnnnnnnnnnnnnnnnnnnnnnnnnnnnnnnnnnnnnnnnnnnnnnnnnnnnnnnnnnnnnnnnnnnnnnnnnnnnnnnnnnnnnnnnnnnnnnnnnnnnnnnnnnnnnnnnnnnnnnnnnnnnnnnnnnnnnnnnnnnnnnnnnnnnnnnnnnnnnnnnnnnnnnnnnnnnnnnnnnnnnnnnnnnnnnnnnnnnnnnnnnnnnnnnnnnnnnnnnnnnnnnnnnnnnnnnnnnnnnnnnnnnnnnnnnnnnnnnnnnnnnnnnnnnnnnnnnnnnnnnnnnnnnnnnnnnnnnnnnnnnnnnnnnnnnnnnnnnnnnnnnnnnnnnnnnnnnnnnnnnnnnnnnnnnnnnnnnnnnnnnnnnnnnnnnnnnnnnnnnnnnnnnnnnnnnnnnnnnnnnnnnnnnnnnnnnnnnnnnnnnnnnnnnnnnnnnnnnnnnnnnnnnnnnnnnnnnnnnnnnnnnnnnnnnnnnnnnnnnnnnnnnnnnnnnnnnnnnnnnnnnnnnnnnnnnnnnnnnnnnnnnnnnnnnnnnnnnnnnnnnnnnnnnnnnnnnnnnnnnnnnnnnnnnnnnnnnnnnnnnnnnnnnnnnnnnnnnnnnnnnnnnnnnnnnnnnnnnnnnnnnnnnnnnnnnnnnnnnnnnnnnnnnnnnnnnnnnnnnnnnnnnnnnnnnnnnnnnnnnnnnnnnnnnnnnnnnnnnnnnnnnnnnnnnnnnnnnnnnnnnnnnnnnnnnnnnnnnnnnnnnnnnnnnnnnnnnnnnnnnnnnnnnnnnnnnnnnnnnnnnnnnnnnnnnnnnnnnnnnnnnnnnnnnnnnnnnnnnnnnnnnnnnnnnnnnnnnnnnnnnnnnnnnnnnnnnnnnnnnnnnnnnnnnnnnnnnnnnnnnnnnnnnnnnnnnnnnnnnnnnnnnnnnnnnnnnnnnnnnnnnnnnnnnnnnnnnnnnnnnnnnnnnnnnnnnnnnnnnnnnnnnnnnnnnnnnnnnnnnnnnnnnnnnnnnnnnnnnnnnnnnnnnnnnnnnnnnnnnnnnnnnnnnnnnnnnnnnnnnnnnnnnnnnnnnnnnnnnnnnnnnnnnnnnnnnnnnnnnnnnnnnnnnnnnnnnnnnnnnnnnnnnnnnnnnnnnnnnnnnnnnnnnnnnnnnnnnnnnnnnnnnnnnnnnnnnnnnnnnnnnnnnnnnnnnnnnnnnnnnnnnnnnnnnnnnnnnnnnnnnnnnnnnnnnnnnnnnnnnnnnnnnnnnnnnnnnnnnnnnnnnnnnnnnnnnnnnnnnnnnnnnnnnnnnnnnnnnnnnnnnnnnnnnnnnnnnnnnnnnnnnnnnnnnnnnnnnnnnnnnnnnnnnnnnnnnnnnnnnnnnnnnnnnnnnnnnnnnnnnnnnnnnnnnnnnnnnnnnnnnnnnnnnnnnnnnnnnnnnnnnnnnnnnnnnnnnnnnnnnnnnnnnnnnnnnnnnnnnnnnnnnnnnnnnnnnnnnnnnnnnnnnnnnnnnnnnnnnnnnnnnnnnnnnnnnnnnnnnnnnnnnnnnnnnnnnnnnnnnnnnnnnnnnnnnnnnnnnnnnnnnnnnnnnnnnnnnnnnnnnnnnnnnnnnnnnnnnnnnnnnnnnnnnnnnnnnnnnnnnnnnnnnnnnnnnnnnnnnnnnnnnnnnnnnnnnnnnnnnnnnnnnnnnnnnnnnnnnnnnnnnnnnnnnnnnnnnnnnnnnnnnnnnnnnnnnnnnnnnnnnnnnnnnnnnnnnnnnnnnnnnnnnnnnnnnnnnnnnnnnnnnnnnnnnnnnnnnnnnnnnnnnnnnnnnnnnnnnnnnnnnnnnnnnnnnnnnnnnnnnnnnnnnnnnnnnnnnnnnnnnnnnnnnnnnnnnnnnnnnnnnnnnnnnnnnnnnnnnnnnnnnnnnnnnnnnnnnnnnnnnnnnnnnnnnnnnnnnnnnnnnnnnnnnnnnnnnnnnnnnnnnnnnnnnnnnnnnnnnnnnnnnnnnnnnnnnnnnnnnnnnnnnnnnnnnnnnnnnnnnnnnnnnnnnnnnnnnnnnnnnnnnnnnnnnnnnnnnnnnnnnnnnnnnnnnnnnnnnnnnnnnnnnnnnnnnnnnnnnnnnnnnnnnnnnnnnnnnnnnnnnnnnnnnnnnnnnnnnnnnnnnnnnnnnnnnnnnnnnnnnnnnnnnnnnnnnnnnnnnnnnnnnnnnnnnnnnnnnnnnnnnnnnnnnnnnnnnnnnnnnnnnnnnnnnnnnnnnnnnnnnnnnnnnnnnnnnnnnnnnnnnnnnnnnnnnnnnnnnnnnnnnnnnnnnnnnnnnnnnnnnnnnnnnnnnnnnnnnnnnnnnnnnnnnnnnnnnnnnnnnnnnnnnnnnnnnnnnnnnnnnnnnnnnnnnnnnnnnnnnnnnnnnnnnnnnnnnnnnnnnnnnnnnnnnnnnnnnnnnnnnnnnnnnnnnnnnnnnnnnnnnnnnnnnnnnnnnnnnnnnnnnnnnnnnnnnnnnnnnnnnnnnnnnnnnnnnnnnnnnnnnnnnnnnnnnnnnnnnnnnnnnnnnnnnnnnnnnnnnnnnnnnnnnnnnnnnnnnnnnnnnnnnnnnnnnnnnnnnnnnnnnnnnnnnnnnnnnnnnnnnnnnnnnnnnnnnnnnnnnnnnnnnnnnnnnnnnnnnnnnnnnnnnnnnnnnnnnnnnnnnnnnnnnnnnnnnnnnnnnnnnnnnnnnnnnnnnnnnnnnnnnnnnnnnnnnnnnnnnnnnnnnnnnnnnnnnnnnnnnnnnnnnnnnnnnnnnnnnnnnnnnnnnnnnnnnnnnnnnnnnnnnnnnnnnnnnnnnnnnnnnnnnnnnnnnnnnnnnnnnnnnnnnnnnnnnnnnnnnnnnnnnnnnnnnnnnnnnnnnnnnnnnnnnnnnnnnnnnnnnnnnnnnnnnnnnnnnnnnnnnnnnnnnnnnnnnnnnnnnnnnnnnnnnnnnnnnnnnnnnnnnnnnnnnnnnnnnnnnnnnnnnnnnnnnnnnnnnnnnnnnnnnnnnnnnnnnnnnnnnnnnnnnnnnnnnnnnnnnnnnnnnnnnnnnnnnnnnnnnnnnnnnnnnnnnnnnnnnnnnnnnnnnnnnnnnnnnnnnnnnnnnnnnnnnnnnnnnnnnnnnnnnnnnnnnnnnnnnnnnnnnnnnnnnnnnnnnnnnnnnnnnnnnnnnnnnnnnnnnnnnnnnnnnnnnnnnnnnnnnnnnnnnnnnnnnnnnnnnnnnnnnnnnnnnnnnnnnnnnnnnnnnnnnnnnnnnnnnnnnnnnnnnnnnnnnnnnnnnnnnnnnnnnnnnnnnnnnnnnnnnnnnnnnnnnnnnnnnnnnnnnnnnnnnnnnnnnnnnnnnnnnnnnnnnnnnnnnnnnnnnnnnnnnnnnnnnnnnnnnnnnnnnnnnnnnnnnnnnnnnnnnnnnnnnnnnnnnnnnnnnnnnnnnnnnnnnnnnnnnnnnnnnnnnnnnnnnnnnnnnnnnnnnnnnnnnnnnnnnnnnnnnnnnnnnnnnnnnnnnnnnnnnnnnnnnnnnnnnnnnnnnnnnnnnnnnnnnnnnnnnnnnnnnnnnnnnnnnnnnnnnnnnnnnnnnnnnnnnnnnnnnnnnnnnnnnnnnnnnnnnnnnnnnnnnnnnnnnnnnnnnnnnnnnnnnnnnnnnnnnnnnnnnnnnnnnnnnnnnnnnnnnnnnnnnnnnnnnnnnnnnnnnnnnnnnnnnnnnnnnnnnnnnnnnnnnnnnnnnnnnnnnnnnnnnnnnnnnnnnnnnnnnnnnnnnnnnnnnnnnnnnnnnnnnnnnnnnnnnnnnnnnnnnnnnnnnnnnnnnnnnnnnnnnnnnnnnnnnnnnnnnnnnnnnnnnnnnnnnnnnnnnnnnnnnnnnnnnnnnnnnnnnnnnnnnnnnnnnnnnnnnnnnnnnnnnnnnnnnnnnnnnnnnnnnnnnnnnnnnnnnnnnnnnnnnnnnnnnnnnnnnnnnnnnnnnnnnnnnnnnnnnnnnnnnnnnnnnnnnnnnnnnnnnnnnnnnnnnnnnnnnnnnnnnnnnnnnnnnnnnnnnnnnnnnnnnnnnnnnnnnnnnnnnnnnnnnnnnnnnnnnnnnnnnnnnnnnnnnnnnnnnnnnnnnnnnnnnnnnnnnnnnnnnnnnnnnnnnnnnnnnnnnnnnnnnnnnnnnnnnnnnnnnnnnnnnnnnnnnnnnnnnnnnnnnnnnnnnnnnnnnnnnnnnnnnnnnnnnnnnnnnnnnnnnnnnnnnnnnnnnnnnnnnnnnnnnnnnnnnnnnnnnnnnnnnnnnnnnnnnnnnnnnnnnnnnnnnnnnnnnnnnnnnnnnnnnnnnnnnnnnnnnnnnnnnnnnnnnnnnnnnnnnnnnnnnnnnnnnnnnnnnnnnnnnnnnnnnnnnnnnnnnnnnnnnnnnnnnnnnnnnnnnnnnnnnnnnnnnnnnnnnnnnnnnnnnnnnnnnnnnnnnnnnnnnnnnnnnnnnnnnnnnnnnnnnnnnnnnnnnnnnnnnnnnnnnnnnnnnnnnnnnnnnnnnnnnnnnnnnnnnnnnnnnnnnnnnnnnnnnnnnnnnnnnnnnnnnnnnnnnnnnnnnnnnnnnnnnnnnnnnnnnnnnnnnnnnnnnnnnnnnnnnnnnnnnnnnnnnnnnnnnnnnnnnnnnnnnnnnnnnnnnnnnnnnnnnnnnnnnnnnnnnnnnnnnnnnnnnnnnnnnnnnnnnnnnnnnnnnnnnnnnnnnnnnnnnnnnnnnnnnnnnnnnnnnnnnnnnnnnnnnnnnnnnnnnnnnnnnnnnnnnnnnnnnnnnnnnnnnnnnnnnnnnnnnnnnnnnnnnnnnnnnnnnnnnnnnnnnnnnnnnnnnnnnnnnnnnnnnnnnnnnnnnnnnnnnnnnnnnnnnnnnnnnnnnnnnnnnnnnnnnnnnnnnnnnnnnnnnnnnnnnnnnnnnnnnnnnnnnnnnnnnnnnnnnnnnnnnnnnnnnnnnnnnnnnnnnnnnnnnnnnnnnnnnnnnnnnnnnnnnnnnnnnnnnnnnnnnnnnnnnnnnnnnnnnnnnnnnnnnnnnnnnnnnnnnnnnnnnnnnnnnnnnnnnnnnnnnnnnnnnnnnnnnnnnnnnnnnnnnnnnnnnnnnnnnnnnnnnnnnnnnnnnnnnnnnnnnnnnnnnnnnnnnnnnnnnnnnnnnnnnnnnnnnnnnnnnnnnnnnnnnnnnnnnnnnnnnnnnnnnnnnnnnnnnnnnnnnnnnnnnnnnnnnnnnnnnnnnnnnnnnnnnnnnnnnnnnnnnnnnnnnnnnnnnnnnnnnnnnnnnnnnnnnnnnnnnnnnnnnnnnnnnnnnnnnnnnnnnnnnnnnnnnnnnnnnnnnnnnnnnnnnnnnnnnnnnnnnnnnnnnnnnnnnnnnnnnnnnnnnnnnnnnnnnnnnnnnnnnnnnnnnnnnnnnnnnnnnnnnnnnnnnnnnnnnnnnnnnnnnnnnnnnnnnnnnnnnnnnnnnnnnnnnnnnnnnnnnnnnnnnnnnnnnnnnnnnnnnnnnnnnnnnnnnnnnnnnnnnnnnnnnnnnnnnnnnnnnnnnnnnnnnnnnnnnnnnnnnnnnnnnnnnnnnnnnnnnnnnnnnnnnnnnnnnnnnnnnnnnnnnnnnnnnnnnnnnnnnnnnnnnnnnnnnnnnnnnnnnnnnnnnnnnnnnnnnnnnnnnnnnnnnnnnnnnnnnnnnnnnnnnnnnnnnnnnnnnnnnnnnnnnnnnnnnnnnnnnnnnnnnnnnnnnnnnnnnnnnnnnnnnnnnnnnnnnnnnnnnnnnnnnnnnnnnnnnnnnnnnnnnnnnnnnnnnnnnnnnnnnnnnnnnnnnnnnnnnnnnnnnnnnnnnnnnnnnnnnnnnnnnnnnnnnnnnnnnnnnnnnnnnnnnnnnnnnnnnnnnnnnnnnnnnnnnnnnnnnnnnnnnnnnnnnnnnnnnnnnnnnnnnnnnnnnnnnnnnnnnnnnnnnnnnnnnnnnnnnnnnnnnnnnnnnnnnnnnnnnnnnnnnnnnnnnnnnnnnnnnnnnnnnnnnnnnnnnnnnnnnnnnnnnnnnnnnnnnnnnnnnnnnnnnnnnnnnnnnnnnnnnnnnnnnnnnnnnnnnnnnnnnnnnnnnnnnnnnnnnnnnnnnnnnnnnnnnnnnnnnnnnnnnnnnnnnnnnnnnnnnnnnnnnnnnnnnnnnnnnnnnnnnnnnnnnnnnnnnnnnnnnnnnnnnnnnnnnnnnnnnnnnnnnnnnnnnnnnnnnnnnnnnnnnnnnnnnnnnnnnnnnnnnnnnnnnnnnnnnnnnnnnnnnnnnnnnnnnnnnnnnnnnnnnnnnnnnnnnnnnnnnnnnnnnnnnnnnnnnnnnnnnnnnnnnnnnnnnnnnnnnnnnnnnnnnnnnnnnnnnnnnnnnnnnnnnnnnnnnnnnnnnnnnnnnnnnnnnnnnnnnnnnnnnnnnnnnnnnnnnnnnnnnnnnnnnnnnnnnnnnnnnnnnnnnnnnnnnnnnnnnnnnnnnnnnnnnnnnnnnnnnnnnnnnnnnnnnnnnnnnnnnnnnnnnnnnnnnnnnnnnnnnnnnnnnnnnnnnnnnnnnnnnnnnnnnnnnnnnnnnnnnnnnnnnnnnnnnnnnnnnnnnnnnnnnnnnnnnnnnnnnnnnnnnnnnnnnnnnnnnnnnnnnnnnnnnnnnnnnnnnnnnnnnnnnnnnnnnnnnnnnnnnnnnnnnnnnnnnnnnnnnnnnnnnnnnnnnnnnnnnnnnnnnnnnnnnnnnnnnnnnnnnnnnnnnnnnnnnnnnnnnnnnnnnnnnnnnnnnnnnnnnnnnnnnnnnnnnnnnnnnnnnnnnnnnnnnnnnnnnnnnnnnnnnnnnnnnnnnnnnnnnnnnnnnnnnnnnnnnnnnnnnnnnnnnnnnnnnnnnnnnnnnnnnnnnnnnnnnnnnnnnnnnnnnnnnnnnnnnnnnnnnnnnnnnnnnnnnnnnnnnnnnnnnnnnnnnnnnnnnnnnnnnnnnnnnnnnnnnnnnnnnnnnnnnnnnnnnnnnnnnnnnnnnnnnnnnnnnnnnnnnnnnnnnnnnnnnnnnnnnnnnnnnnnnnnnnnnnnnnnnnnnnnnnnnnnnnnnnnnnnnnnnnnnnnnnnnnnnnnnnnnnnnnnnnnnnnnnnnnnnnnnnnnnnnnnnnnnnnnnnnnnnnnnnnnnnnnnnnnnnnnnnnnnnnnnnnnnnnnnnnnnnnnnnnnnnnnnnnnnnnnnnnnnnnnnnnnnnnnnnnnnnnnnnnnnnnnnnnnnnnnnnnnnnnnnnnnnnnnnnnnnnnnnnnnnnnnnnnnnnnnnnnnnnnnnnnnnnnnnnnnnnnnnnnnnnnnnnnnnnnnnnnnnnnnnnnnnnnnnnnnnnnnnnnnnnnnnnnnnnnnnnnnnnnnnnnnnnnnnnnnnnnnnnnnnnnnnnnnnnnnnnnnnnnnnnnnnnnnnnnnnnnnnnnnnnnnnnnnnnnnnnnnnnnnnnnnnnnnnnnnnnnnnnnnnnnnnnnnnnnnnnnnnnnnnnnnnnnnnnnnnnnnnnnnnnnnnnnnnnnnnnnnnnnnnnnnnnnnnnnnnnnnnnnnnnnnnnnnnnnnnnnnnnnnnnnnnnnnnnnnnnnnnnnnnnnnnnnnnnnnnnnnnnnnnnnnnnnnnnnnnnnnnnnnnnnnnnnnnnnnnnnnnnnnnnnnnnnnnnnnnnnnnnnnnnnnnnnnnnnnnnnnnnnnnnnnnnnnnnnnnnnnnnnnnnnnnnnnnnnnnnnnnnnnnnnnnnnnnnnnnnnnnnnnnnnnnnnnnnnnnnnnnnnnnnnnnnnnnnnnnnnnnnnnnnnnnnnnnnnnnnnnnnnnnnnnnnnnnnnnnnnnnnnnnnnnnnnnnnnnnnnnnnnnnnnnnnnnnnnnnnnnnnnnnnnnnnnnnnnnnnnnnnnnnnnnnnnnnnnnnnnnnnnnnnnnnnnnnnnnnnnnnnnnnnnnnnnnnnnnnnnnnnnnnnnnnnnnnnnnnnnnnnnnnnnnnnnnnnnnnnnnnnnnnnnnnnnnnnnnnnnnnnnnnnnnnnnnnnnnnnnnnnnnnnnnnnnnnnnnnnnnnnnnnnnnnnnnnnnnnnnnnnnnnnnnnnnnnnnnnnnnnnnnnnnnnnnnnnnnnnnnnnnnnnnnnnnnnnnnnnnnnnnnnnnnnnnnnnnnnnnnnnnnnnnnnnnnnnnnnnnnnnnnnnnnnnnnnnnnnnnnnnnnnnnnnnnnnnnnnnnnnnnnnnnnnnnnnnnnnnnnnnnnnnnnnnnnnnnnnnnnnnnnnnnnnnnnnnnnnnnnnnnnnnnnnnnnnnnnnnnnnnnnnnnnnnnnnnnnnnnnnnnnnnnnnnnnnnnnnnnnnnnnnnnnnnnnnnnnnnnnnnnnnnnnnnnnnnnnnnnnnnnnnnnnnnnnnnnnnnnnnnnnnnnnnnnnnnnnnnnnnnnnnnnnnnnnnnnnnnnnnnnnnnnnnnnnnnnnnnnnnnnnnnnnnnnnnnnnnnnnnnnnnnnnnnnnnnnnnnnnnnnnnnnnnnnnnnnnnnnnnnnnnnnnnnnnnnnnnnnnnnnnnnnnnnnnnnnnnnnnnnnnnnnnnnnnnnnnnnnnnnnnnnnnnnnnnnnnnnnnnnnnnnnnnnnnnnnnnnnnnnnnnnnnnnnnnnnnnnnnnnnnnnnnnnnnnnnnnnnnnnnnnnnnnnnnnnnnnnnnnnnnnnnnnnnnnnnnnnnnnnnnnnnnnnnnnnnnnnnnnnnnnnnnnnnnnnnnnnnnnnnnnnnnnnnnnnnnnnnnnnnnnnnnnnnnnnnnnnnnnnnnnnnnnnnnnnnnnnnnnnnnnnnnnnnnnnnnnnnnnnnnnnnnnnnnnnnnnnnnnnnnnnnnnnnnnnnnnnnnnnnnnnnnnnnnnnnnnnnnnnnnnnnnnnnnnnnnnnnnnnnnnnnnnnnnnnnnnnnnnnnnnnnnnnnnnnnnnnnnnnnnnnnnnnnnnnnnnnnnnnnnnnnnnnnnnnnnnnnnnnnnnnnnnnnnnnnnnnnnnnnnnnnnnnnnnnnnnnnnnnnnnnnnnnnnnnnnnnnnnnnnnnnnnnnnnnnnnnnnnnnnnnnnnnnnnnnnnnnnnnnnnnnnnnnnnnnnnnnnnnnnnnnnnnnnnnnnnnnnnnnnnnnnnnnnnnnnnnnnnnnnnnnnnnnnnnnnnnnnnnnnnnnnnnnnnnnnnnnnnnnnnnnnnnnnnnnnnnnnnnnnnnnnnnnnnnnnnnnnnnnnnnnnnnnnnnnnnnnnnnnnnnnnnnnnnnnnnnnnnnnnnnnnnnnnnnnnnnnnnnnnnnnnnnnnnnnnnnnnnnnnnnnnnnnnnnnnnnnnnnnnnnnnnnnnnnnnnnnnnnnnnnnnnnnnnnnnnnnnnnnnnnnnnnnnnnnnnnnnnnnnnnnnnnnnnnnnnnnnnnnnnnnnnnnnnnnnnnnnnnnnnnnnnnnnnnnnnnnnnnnnnnnnnnnnnnnnnnnnnnnnnnnnnnnnnnnnnnnnnnnnnnnnnnnnnnnnnnnnnnnnnnnnnnnnnnnnnnnnnnnnnnnnnnnnnnnnnnnnnnnnnnnnnnnnnnnnnnnnnnnnnnnnnnnnnnnnnnnnnnnnnnnnnnnnnnnnnnnnnnnnnnnnnnnnnnnnnnnnnnnnnnnnnnnnnnnnnnnnnnnnnnnnnnnnnnnnnnnnnnnnnnnnnnnnnnnnnnnnnnnnnnnnnnnnnnnnnnnnnnnnnnnnnnnnnnnnnnnnnnnnnnnnnnnnnnnnnnnnnnnnnnnnnnnnnnnnnnnnnnnnnnnnnnnnnnnnnnnnnnnnnnnnnnnnnnnnnnnnnnnnnnnnnnnnnnnnnnnnnnnnnnnnnnnnnnnnnnnnnnnnnnnnnnnnnnnnnnnnnnnnnnnnnnnnnnnnnnnnnnnnnnnnnnnnnnnnnnnnnnnnnnnnnnnnnnnnnnnnnnnnnnnnnnnnnnnnnnnnnnnnnnnnnnnnnnnnnnnnnnnnnnnnnnnnnnnnnnnnnnnnnnnnnnnnnnnnnnnnnnnnnnnnnnnnnnnnnnnnnnnnnnnnnnnnnnnnnnnnnnnnnnnnnnnnnnnnnnnnnnnnnnnnnnnnnnnnnnnnnnnnnnnnnnnnnnnnnnnnnnnnnnnnnnnnnnnnnnnnnnnnnnnnnnnnnnnnnnnnnnnnnnnnnnnnnnnnnnnnnnnnnnnnnnnnnnnnnnnnnnnnnnnnnnnnnnnnnnnnnnnnnnnnnnnnnnnnnnnnnnnnnnnnnnnnnnnnnnnnnnnnnnnnnnnnnnnnnnnnnnnnnnnnnnnnnnnnnnnnnnnnnnnnnnnnnnnnnnnnnnnnnnnnnnnnnnnnnnnnnnnnnnnnnnnnnnnnnnnnnnnnnnnnnnnnnnnnnnnnnnnnnnnnnnnnnnnnnnnnnnnnnnnnnnnnnnnnnnnnnnnnnnnnnnnnnnnnnnnnnnnnnnnnnnnnnnnnnnnnnnnnnnnnnnnnnnnnnnnnnnnnnnnnnnnnnnnnnnnnnnnnnnnnnnnnnnnnnnnnnnnnnnnnnnnnnnnnnnnnnnnnnnnnnnnnnnnnnnnnnnnnnnnnnnnnnnnnnnnnnnnnnnnnnnnnnnnnnnnnnnnnnnnnnnnnnnnnnnnnnnnnnnnnnnnnnnnnnnnnnnnnnnnnnnnnnnnnnnnnnnnnnnnnnnnnnnnnnnnnnnnnnnnnnnnnnnnnnnnnnnnnnnnnnnnnnnnnnnnnnnnnnnnnnnnnnnnnnnnnnnnnnnnnnnnnnnnnnnnnnnnnnnnnnnnnnnnnnnnnnnnnnnnnnnnnnnnnnnnnnnnnnnnnnnnnnnnnnnnnnnnnnnnnnnnnnnnnnnnnnnnnnnnnnnnnnnnnnnnnnnnnnnnnnnnnnnnnnnnnnnnnnnnnnnnnnnnnnnnnnnnnnnnnnnnnnnnnnnnnnnnnnnnnnnnnnnnnnnnnnnnnnnnnnnnnnnnnnnnnnnnnnnnnnnnnnnnnnnnnnnnnnnnnnnnnnnnnnnnnnnnnnnnnnnnnnnnnnnnnnnnnnnnnnnnnnnnnnnnnnnnnnnnnnnnnnnnnnnnnnnnnnnnnnnnnnnnnnnnnnnnnnnnnnnnnnnnnnnnnnnnnnnnnnnnnnnnnnnnnnnnnnnnnnnnnnnnnnnnnnnnnnnnnnnnnnnnnnnnnnnnnnnnnnnnnnnnnnnnnnnnnnnnnnnnnnnnnnnnnnnnnnnnnnnnnnnnnnnnnnnnnnnnnnnnnnnnnnnnnnnnnnnnnnnnnnnnnnnnnnnnnnnnnnnnnnnnnnnnnnnnnnnnnnnnnnnnnnnnnnnnnnnnnnnnnnnnnnnnnnnnnnnnnnnnnnnnnnnnnnnnnnnnnnnnnnnnnnnnnnnnnnnnnnnnnnnnnnnnnnnnnnnnnnnnnnnnnnnnnnnnnnnnnnnnnnnnnnnnnnnnnnnnnnnnnnnnnnnnnnnnnnnnnnnnnnnnnnnnnnnnnnnnnnnnnnnnnnnnnnnnnnnnnnnnnnnnnnnnnnnnnnnnnnnnnnnnnnnnnnnnnnnnnnnnnnnnnnnnnnnnnnnnnnnnnnnnnnnnnnnnnnnnnnnnnnnnnnnnnnnnnnnnnnnnnnnnnnnnnnnnnnnnnnnnnnnnnnnnnnnnnnnnnnnnnnnnnnnnnnnnnnnnnnnnnnnnnnnnnnnnnnnnnnnnnnnnnnnnnnnnnnnnnnnnnnnnnnnnnnnnnnnnnnnnnnnnnnnnnnnnnnnnnnnnnnnnnnnnnnnnnnnnnnnnnnnnnnnnnnnnnnnnnnnnnnnnnnnnnnnnnnnnnnnnnnnnnnnnnnnnnnnnnnnnnnnnnnnnnnnnnnnnnnnnnnnnnnnnnnnnnnnnnnnnnnnnnnnnnnnnnnnnnnnnnnnnnnnnnnnnnnnnnnnnnnnnnnnnnnnnnnnnnnnnnnnnnnnnnnnnnnnnnnnnnnnnnnnnnnnnnnnnnnnnnnnnnnnnnnnnnnnnnnnnnnnnnnnnnnnnnnnnnnnnnnnnnnnnnnnnnnnnnnnnnnnnnnnnnnnnnnnnnnnnnnnnnnnnnnnnnnnnnnnnnnnnnnnnnnnnnnnnnnnnnnnnnnnnnnnnnnnnnnnnnnnnnnnnnnnnnnnnnnnnnnnnnnnnnnnnnnnnnnnnnnnnnnnnnnnnnnnnnnnnnnnnnnnnnnnnnnnnnnnnnnnnnnnnnnnnnnnnnnnnnnnnnnnnnnnnnnnnnnnnnnnnnnnnnnnnnnnnnnnnnnnnnnnnnnnnnnnnnnnnnnnnnnnnnnnnnnnnnnnnnnnnnnnnnnnnnnnnnnnnnnnnnnnnnnnnnnnnnnnnnnnnnnnnnnnnnnnnnnnnnnnnnnnnnnnnnnnnnnnnnnnnnnnnnnnnnnnnnnnnnnnnnnnnnnnnnnnnnnnnnnnnnnnnnnnnnnnnnnnnnnnnnnnnnnnnnnnnnnnnnnnnnnnnnnnnnnnnnnnnnnnnnnnnnnnnnnnnnnnnnnnnnnnnnnnnnnnnnnnnnnnnnnnnnnnnnnnnnnnnnnnnnnnnnnnnnnnnnnnnnnnnnnnnnnnnnnnnnnnnnnnnnnnnnnnnnnnnnnnnnnnnnnnnnnnnnnnnnnnnnnnnnnnnnnnnnnnnnnnnnnnnnnnnnnnnnnnnnnnnnnnnnnnnnnnnnnnnnnnnnnnnnnnnnnnnnnnnnnnnnnnnnnnnnnnnnnnnnnnnnnnnnnnnnnnnnnnnnnnnnnnnnnnnnnnnnnnnnnnnnnnnnnnnnnnnnnnnnnnnnnnnnnnnnnnnnnnnnnnnnnnnnnnnnnnnnnnnnnnnnnnnnnnnnnnnnnnnnnnnnnnnnnnnnnnnnnnnnnnnnnnnnnnnnnnnnnnnnnnnnnnnnnnnnnnnnnnnnnnnnnnnnnnnnnnnnnnnnnnnnnnnnnnnnnnnnnnnnnnnnnnnnnnnnnnnnnnnnnnnnnnnnnnnnnnnnnnnnnnnnnnnnnnnnnnnnnnnnnnnnnnnnnnnnnnnnnnnnnnnnnnnnnnnnnnnnnnnnnnnnnnnnnnnnnnnnnnnnnnnnnnnnnnnnnnnnnnnnnnnnnnnnnnnnnnnnnnnnnnnnnnnnnnnnnnnnnnnnnnnnnnnnnnnnnnnnnnnnnnnnnnnnnnnnnnnnnnnnnnnnnnnnnnnnnnnnnnnnnnnnnnnnnnnnnnnnnnnnnnnnnnnnnnnnnnnnnnnnnnnnnnnnnnnnnnnnnnnnnnnnnnnnnnnnnnnnnnnnnnnnnnnnnnnnnnnnnnnnnnnnnnnnnnnnnnnnnnnnnnnnnnnnnnnnnnnnnnnnnnnnnnnnnnnnnnnnnnnnnnnnnnnnnnnnnnnnnnnnnnnnnnnnnnnnnnnnnnnnnnnnnnnnnnnnnnnnnnnnnnnnnnnnnnnnnnnnnnnnnnnnnnnnnnnnnnnnnnnnnnnnnnnnnnnnnnnnnnnnnnnnnnnnnnnnnnnnnnnnnnnnnnnnnnnnnnnnnnnnnnnnnnnnnnnnnnnnnnnnnnnnnnnnnnnnnnnnnnnnnnnnnnnnnnnnnnnnnnnnnnnnnnnnnnnnnnnnnnnnnnnnnnnnnnnnnnnnnnnnnnnnnnnnnnnnnnnnnnnnnnnnnnnnnnnnnnnnnnnnnnnnnnnnnnnnnnnnnnnnnnnnnnnnnnnnnnnnnnnnnnnnnnnnnnnnnnnnnnnnnnnnnnnnnnnnnnnnnnnnnnnnnnnnnnnnnnnnnnnnnnnnnnnnnnnnnnnnnnnnnnnnnnnnnnnnnnnnnnnnnnnnnnnnnnnnnnnnnnnnnnnnnnnnnnnnnnnnnnnnnnnnnnnnnnnnnnnnnnnnnnnnnnnnnnnnnnnnnnnnnnnnnnnnnnnnnnnnnnnnnnnnnnnnnnnnnnnnnnnnnnnnnnnnnnnnnnnnnnnnnnnnnnnnnnnnnnnnnnnnnnnnnnnnnnnnnnnnnnnnnnnnnnnnnnnnnnnnnnnnnnnnnnnnnnnnnnnnnnnnnnnnnnnnnnnnnnnnnnnnnnnnnnnnnnnnnnnnnnnnnnnnnnnnnnnnnnnnnnnnnnnnnnnnnnnnnnnnnnnnnnnnnnnnnnnnnnnnnnnnnnnnnnnnnnnnnnnnnnnnnnnnnnnnnnnnnnnnnnnnnnnnnnnnnnnnnnnnnnnnnnnnnnnnnnnnnnnnnnnnnnnnnnnnnnnnnnnnnnnnnnnnnnnnnnnnnnnnnnnnnnnnnnnnnnnnnnnnnnnnnnnnnnnnnnnnnnnnnnnnnnnnnnnnnnnnnnnnnnnnnnnnnnnnnnnnnnnnnnnnnnnnnnnnnnnnnnnnnnnnnnnnnnnnnnnnnnnnnnnnnnnnnnnnnnnnnnnnnnnnnnnnnnnnnnnnnnnnnnnnnnnnnnnnnnnnnnnnnnnnnnnnnnnnnnnnnnnnnnnnnnnnnnnnnnnnnnnnnnnnnnnnnnnnnnnnnnnnnnnnnnnnnnnnnnnnnnnnnnnnnnnnnnnnnnnnnnnnnnnnnnnnnnnnnnnnnnnnnnnnnnnnnnnnnnnnnnnnnnnnnnnnnnnnnnnnnnnnnnnnnnnnnnnnnnnnnnnnnnnnnnnnnnnnnnnnnnnnnnnnnnnnnnnnnnnnnnnnnnnnnnnnnnnnnnnnnnnnnnnnnnnnnnnnnnnnnnnnnnnnnnnnnnnnnnnnnnnnnnnnnnnnnnnnnnnnnnnnnnnnnnnnnnnnnnnnnnnnnnnnnnnnnnnnnnnnnnnnnnnnnnnnnnnnnnnnnnnnnnnnnnnnnnnnnnnnnnnnnnnnnnnnnnnnnnnnnnnnnnnnnnnnnnnnnnnnnnnnnnnnnnnnnnnnnnnnnnnnnnnnnnnnnnnnnnnnnnnnnnnnnnnnnnnnnnnnnnnnnnnnnnnnnnnnnnnnnnnnnnnnnnnnnnnnnnnnnnnnnnnnnnnnnnnnnnnnnnnnnnnnnnnnnnnnnnnnnnnnnnnnnnnnnnnnnnnnnnnnnnnnnnnnnnnnnnnnnnnnnnnnnnnnnnnnnnnnnnnnnnnnnnnnnnnnnnnnnnnnnnnnnnnnnnnnnnnnnnnnnnnnnnnnnnnnnnnnnnnnnnnnnnnnnnnnnnnnnnnnnnnnnnnnnnnnnnnnnnnnnnnnnnnnnnnnnnnnnnnnnnnnnnnnnnnnnnnnnnnnnnnnnnnnnnnnnnnnnnnnnnnnnnnnnnnnnnnnnnnnnnnnnnnnnnnnnnnnnnnnnnnnnnnnnnnnnnnnnnnnnnnnnnnnnnnnnnnnnnnnnnnnnnnnnnnnnnnnnnnnnnnnnnnnnnnnnnnnnnnnnnnnnnnnnnnnnnnnnnnnnnnnnnnnnnnnnnnnnnnnnnnnnnnnnnnnnnnnnnnnnnnnnnnnnnnnnnnnnnnnnnnnnnnnnnnnnnnnnnnnnnnnnnnnnnnnnnnnnnnnnnnnnnnnnnnnnnnnnnnnnnnnnnnnnnnnnnnnnnnnnnnnnnnnnnnnnnnnnnnnnnnnnnnnnnnnnnnnnnnnnnnnnnnnnnnnnnnnnnnnnnnnnnnnnnnnnnnnnnnnnnnnnnnnnnnnnnnnnnnnnnnnnnnnnnnnnnnnnnnnnnnnnnnnnnnnnnnnnnnnnnnnnnnnnnnnnnnnnnnnnnnnnnnnnnnnnnnnnnnnnnnnnnnnnnnnnnnnnnnnnnnnnnnnnnnnnnnnnnnnnnnnnnnnnnnnnnnnnnnnnnnnnnnnnnnnnnnnnnnnnnnnnnnnnnnnnnnnnnnnnnnnnnnnnnnnnnnnnnnnnnnnnnnnnnnnnnnnnnnnnnnnnnnnnnnnnnnnnnnnnnnnnnnnnnnnnnnnnnnnnnnnnnnnnnnnnnnnnnnnnnnnnnnnnnnnnnnnnnnnnnnnnnnnnnnnnnnnnnnnnnnnnnnnnnnnnnnnnnnnnnnnnnnnnnnnnnnnnnnnnnnnnnnnnnnnnnnnnnnnnnnnnnnnnnnnnnnnnnnnnnnnnnnnnnnnnnnnnnnnnnnnnnnnnnnnnnnnnnnnnnnnnnnnnnnnnnnnnnnnnnnnnnnnnnnnnnnnnnnnnnnnnnnnnnnnnnnnnnnnnnnnnnnnnnnnnnnnnnnnnnnnnnnnnnnnnnnnnnnnnnnnnnnnnnnnnnnnnnnnnnnnnnnnnnnnnnnnnnnnnnnnnnnnnnnnnnnnnnnnnnnnnnnnnnnnnnnnnnnnnnnnnnnnnnnnnnnnnnnnnnnnnnnnnnnnnnnnnnnnnnnnnnnnnnnnnnnnnnnnnnnnnnnnnnnnnnnnnnnnnnnnnnnnnnnnnnnnnnnnnnnnnnnnnnnnnnnnnnnnnnnnnnnnnnnnnnnnnnnnnnnnnnnnnnnnnnnnnnnnnnnnnnnnnnnnnnnnnnnnnnnnnnnnnnnnnnnnnnnnnnnnnnnnnnnnnnnnnnnnnnnnnnnnnnnnnnnnnnnnnnnnnnnnnnnnnnnnnnnnnnnnnnnnnnnnnnnnnnnnnnnnnnnnnnnnnnnnnnnnnnnnnnnnnnnnnnnnnnnnnnnnnnnnnnnnnnnnnnnnnnnnnnnnnnnnnnnnnnnnnnnnnnnnnnnnnnnnnnnnnnnnnnnnnnnnnnnnnnnnnnnnnnnnnnnnnnnnnnnnnnnnnnnnnnnnnnnnnnnnnnnnnnnnnnnnnnnnnnnnnnnnnnnnnnnnnnnnnnnnnnnnnnnnnnnnnnnnnnnnnnnnnnnnnnnnnnnnnnnnnnnnnnnnnnnnnnnnnnnnnnnnnnnnnnnnnnnnnnnnnnnnnnnnnnnnnnnnnnnnnnnnnnnnnnnnnnnnnnnnnnnnnnnnnnnnnnnnnnnnnnnnnnnnnnnnnnnnnnnnnnnnnnnnnnnnnnnnnnnnnnnnnnnnnnnnnnnnnnnnnnnnnnnnnnnnnnnnnnnnnnnnnnnnnnnnnnnnnnnnnnnnnnnnnnnnnnnnnnnnnnnnnnnnnnnnnnnnnnnnnnnnnnnnnnnnnnnnnnnnnnnnnnnnnnnnnnnnnnnnnnnnnnnnnnnnnnnnnnnnnnnnnnnnnnnnnnnnnnnnnnnnnnnnnnnnnnnnnnnnnnnnnnnnnnnnnnnnnnnnnnnnnnnnnnnnnnnnnnnnnnnnnnnnnnnnnnnnnnnnnnnnnnnnnnnnnnnnnnnnnnnnnnnnnnnnnnnnnnnnnnnnnnnnnnnnnnnnnnnnnnnnnnnnnnnnnnnnnnnnnnnnnnnnnnnnnnnnnnnnnnnnnnnnnnnnnnnnnnnnnnnnnnnnnnnnnnnnnnnnnnnnnnnnnnnnnnnnnnnnnnnnnnnnnnnnnnnnnnnnnnnnnnnnnnnnnnnnnnnnnnnnnnnnnnnnnnnnnnnnnnnnnnnnnnnnnnnnnnnnnnnnnnnnnnnnnnnnnnnnnnnnnnnnnnnnnnnnnnnnnnnnnnnnnnnnnnnnnnnnnnnnnnnnnnnnnnnnnnnnnnnnnnnnnnnnnnnnnnnnnnnnnnnnnnnnnnnnnnnnnnnnnnnnnnnnnnnnnnnnnnnnnnnnnnnnnnnnnnnnnnnnnnnnnnnnnnnnnnnnnnnnnnnnnnnnnnnnnnnnnnnnnnnnnnnnnnnnnnnnnnnnnnnnnnnnnnnnnnnnnnnnnnnnnnnnnnnnnnnnnnnnnnnnnnnnnnnnnnnnnnnnnnnnnnnnnnnnnnnnnnnnnnnnnnnnnnnnnnnnnnnnnnnnnnnnnnnnnnnnnnnnnnnnnnnnnnnnnnnnnnnnnnnnnnnnnnnnnnnnnnnnnnnnnnnnnnnnnnnnnnnnnnnnnnnnnnnnnnnnnnnnnnnnnnnnnnnnnnnnnnnnnnnnnnnnnnnnnnnnnnnnnnnnnnnnnnnnnnnnnnnnnnnnnnnnnnnnnnnnnnnnnnnnnnnnnnnnnnnnnnnnnnnnnnnnnnnnnnnnnnnnnnnnnnnnnnnnnnnnnnnnnnnnnnnnnnnnnnnnnnnnnnnnnnnnnnnnnnnnnnnnnnnnnnnnnnnnnnnnnnnnnnnnnnnnnnnnnnnnnnnnnnnnnnnnnnnnnnnnnnnnnnnnnnnnnnnnnnnnnnnnnnnnnnnnnnnnnnnnnnnnnnnnnnnnnnnnnnnnnnnnnnnnnnnnnnnnnnnnnnnnnnnnnnnnnnnnnnnnnnnnnnnnnnnnnnnnnnnnnnnnnnnnnnnnnnnnnnnnnnnnnnnnnnnnnnnnnnnnnnnnnnnnnnnnnnnnnnnnnnnnnnnnnnnnnnnnnnnnnnnnnnnnnnnnnnnnnnnnnnnnnnnnnnnnnnnnnnnnnnnnnnnnnnnnnnnnnnnnnnnnnnnnnnnnnnnnnnnnnnnnnnnnnnnnnnnnnnnnnnnnnnnnnnnnnnnnnnnnnnnnnnnnnnnnnnnnnnnnnnnnnnnnnnnnnnnnnnnnnnnnnnnnnnnnnnnnnnnnnnnnnnnnnnnnnnnnnnnnnnnnnnnnnnnnnnnnnnnnnnnnnnnnnnnnnnnnnnnnnnnnnnnnnnnnnnnnnnnnnnnnnnnnnnnnnnnnnnnnnnnnnnnnnnnnnnnnnnnnnnnnnnnnnnnnnnnnnnnnnnnnnnnnnnnnnnnnnnnnnnnnnnnnnnnnnnnnnnnnnnnnnnnnnnnnnnnnnnnnnnnnnnnnnnnnnnnnnnnnnnnnnnnnnnnnnnnnnnnnnnnnnnnnnnnnnnnnnnnnnnnnnnnnnnnnnnnnnnnnnnnnnnnnnnnnnnnnnnnnnnnnnnnnnnnnnnnnnnnnnnnnnnnnnnnnnnnnnnnnnnnnnnnnnnnnnnnnnnnnnnnnnnnnnnnnnnnnnnnnnnnnnnnnnnnnnnnnnnnnnnnnnnnnnnnnnnnnnnnnnnnnnnnnnnnnnnnnnnnnnnnnnnnnnnnnnnnnnnnnnnnnnnnnnnnnnnnnnnnnnnnnnnnnnnnnnnnnnnnnnnnnnnnnnnnnnnnnnnnnnnnnnnnnnnnnnnnnnnnnnnnnnnnnnnnnnnnnnnnnnnnnnnnnnnnnnnnnnnnnnnnnnnnnnnnnnnnnnnnnnnnnnnnnnnnnnnnnnnnnnnnnnnnnnnnnnnnnnnnnnnnnnnnnnnnnnnnnnnnnnnnnnnnnnnnnnnnnnnnnnnnnnnnnnnnnnnnnnnnnnnnnnnnnnnnnnnnnnnnnnnnnnnnnnnnnnnnnnnnnnnnnnnnnnnnnnnnnnnnnnnnnnnnnnnnnnnnnnnnnnnnnnnnnnnnnnnnnnnnnnnnnnnnnnnnnnnnnnnnnnnnnnnnnnnnnnnnnnnnnnnnnnnnnnnnnnnnnnnnnnnnnnnnnnnnnnnnnnnnnnnnnnnnnnnnnnnnnnnnnnnnnnnnnnnnnnnnnnnnnnnnnnnnnnnnnnnnnnnnnnnnnnnnnnnnnnnnnnnnnnnnnnnnnnnnnnnnnnnnnnnnnnnnnnnnnnnnnnnnnnnnnnnnnnnnnnnnnnnnnnnnnnnnnnnnnnnnnnnnnnnnnnnnnnnnnnnnnnnnnnnnnnnnnnnnnnnnnnnnnnnnnnnnnnnnnnnnnnnnnnnnnnnnnnnnnnnnnnnnnnnnnnnnnnnnnnnnnnnnnnnnnnnnnnnnnnnnnnnnnnnnnnnnnnnnnnnnnnnnnnnnnnnnnnnnnnnnnnnnnnnnnnnnnnnnnnnnnnnnnnnnnnnnnnnnnnnnnnnnnnnnnnnnnnnnnnnnnnnnnnnnnnnnnnnnnnnnnnnnnnnnnnnnnnnnnnnnnnnnnnnnnnnnnnnnnnnnnnnnnnnnnnnnnnnnnnnnnnnnnnnnnnnnnnnnnnnnnnnnnnnnnnnnnnnnnnnnnnnnnnnnnnnnnnnnnnnnnnnnnnnnnnnnnnnnnnnnnnnnnnnnnnnnnnnnnnnnnnnnnnnnnnnnnnnnnnnnnnnnnnnnnnnnnnnnnnnnnnnnnnnnnnnnnnnnnnnnnnnnnnnnnnnnnnnnnnnnnnnnnnnnnnnnnnnnnnnnnnnnnnnnnnnnnnnnnnnnnnnnnnnnnnnnnnnnnnnnnnnnnnnnnnnnnnnnnnnnnnnnnnnnnnnnnnnnnnnnnnnnnnnnnnnnnnnnnnnnnnnnnnnnnnnnnnnnnnnnnnnnnnnnnnnnnnnnnnnnnnnnnnnnnnnnnnnnnnnnnnnnnnnnnnnnnnnnnnnnnnnnnnnnnnnnnnnnnnnnnnnnnnnnnnnnnnnnnnnnnnnnnnnnnnnnnnnnnnnnnnnnnnnnnnnnnnnnnnnnnnnnnnnnnnnnnnnnnnnnnnnnnnnnnnnnnnnnnnnnnnnnnnnnnnnnnnnnnnnnnnnnnnnnnnnnnnnnnnnnnnnnnnnnnnnnnnnnnnnnnnnnnnnnnnnnnnnnnnnnnnnnnnnnnnnnnnnnnnnnnnnnnnnnnnnnnnnnnnnnnnnnnnnnnnnnnnnnnnnnnnnnnnnnnnnnnnnnnnnnnnnnnnnnnnnnnnnnnnnnnnnnnnnnnnnnnnnnnnnnnnnnnnnnnnnnnnnnnnnnnnnnnnnnnnnnnnnnnnnnnnnnnnnnnnnnnnnnnnnnnnnnnnnnnnnnnnnnnnnnnnnnnnnnnnnnnnnnnnnnnnnnnnnnnnnnnnnnnnnnnnnnnnnnnnnnnnnnnnnnnnnnnnnnnnnnnnnnnnnnnnnnnnnnnnnnnnnnnnnnnnnnnnnnnnnnnnnnnnnnnnnnnnnnnnnnnnnnnnnnnnnnnnnnnnnnnnnnnnnnnnnnnnnnnnnnnnnnnnnnnnnnnnnnnnnnnnnnnnnnnnnnnnnnnnnnnnnnnnnnnnnnnnnnnnnnnnnnnnnnnnnnnnnnnnnnnnnnnnnnnnnnnnnnnnnnnnnnnnnnnnnnnnnnnnnnnnnnnnnnnnnnnnnnnnnnnnnnnnnnnnnnnnnnnnnnnnnnnnnnnnnnnnnnnnnnnnnnnnnnnnnnnnnnnnnnnnnnnnnnnnnnnnnnnnnnnnnnnnnnnnnnnnnnnnnnnnnnnnnnnnnnnnnnnnnnnnnnnnnnnnnnnnnnnnnnnnnnnnnnnnnnnnnnnnnnnnnnnnnnnnnnnnnnnnnnnnnnnnnnnnnnnnnnnnnnnnnnnnnnnnnnnnnnnnnnnnnnnnnnnnnnnnnnnnnnnnnnnnnnnnnnnnnnnnnnnnnnnnnnnnnnnnnnnnnnnnnnnnnnnnnnnnnnnnnnnnnnnnnnnnnnnnnnnnnnnnnnnnnnnnnnnnnnnnnnnnnnnnnnnnnnnnnnnnnnnnnnnnnnnnnnnnnnnnnnnnnnnnnnnnnnnnnnnnnnnnnnnnnnnnnnnnnnnnnnnnnnnnnnnnnnnnnnnnnnnnnnnnnnnnnnnnnnnnnnnnnnnnnnnnnnnnnnnnnnnnnnnnnnnnnnnnnnnnnnnnnnnnnnnnnnnnnnnnnnnnnnnnnnnnnnnnnnnnnnnnnnnnnnnnnnnnnnnnnnnnnnnnnnnnnnnnnnnnnnnnnnnnnnnnnnnnnnnnnnnnnnnnnnnnnnnnnnnnnnnnnnnnnnnnnnnnnnnnnnnnnnnnnnnnnnnnnnnnnnnnnnnnnnnnnnnnnnnnnnnnnnnnnnnnnnnnnnnnnnnnnnnnnnnnnnnnnnnnnnnnnnnnnnnnnnnnnnnnnnnnnnnnnnnnnnnnnnnnnnnnnnnnnnnnnnnnnnnnnnnnnnnnnnnnnnnnnnnnnnnnnnnnnnnnnnnnnnnnnnnnnnnnnnnnnnnnnnnnnnnnnnnnnnnnnnnnnnnnnnnnnnnnnnnnnnnnnnnnnnnnnnnnnnnnnnnnnnnnnnnnnnnnnnnnnnnnnnnnnnnnnnnnnnnnnnnnnnnnnnnnnnnnnnnnnnnnnnnnnnnnnnnnnnnnnnnnnnnnnnnnnnnnnnnnnnnnnnnnnnnnnnnnnnnnnnnnnnnnnnnnnnnnnnnnnnnnnnnnnnnnnnnnnnnnnnnnnnnnnnnnnnnnnnnnnnnnnnnnnnnnnnnnnnnnnnnnnnnnnnnnnnnnnnnnnnnnnnnnnnnnnnnnnnnnnnnnnnnnnnnnnnnnnnnnnnnnnnnnnnnnnnnnnnnnnnnnnnnnnnnnnnnnnnnnnnnnnnnnnnnnnnnnnnnnnnnnnnnnnnnnnnnnnnnnnnnnnnnnnnnnnnnnnnnnnnnnnnnnnnnnnnnnnnnnnnnnnnnnnnnnnnnnnnnnnnnnnnnnnnnnnnnnnnnnnnnnnnnnnnnnnnnnnnnnnnnnnnnnnnnnnnnnnnnnnnnnnnnnnnnnnnnnnnnnnnnnnnnnnnnnnnnnnnnnnnnnnnnnnnnnnnnnnnnnnnnnnnnnnnnnnnnnnnnnnnnnnnnnnnnnnnnnnnnnnnnnnnnnnnnnnnnnnnnnnnnnnnnnnnnnnnnnnnnnnnnnnnnnnnnnnnnnnnnnnnnnnnnnnnnnnnnnnnnnnnnnnnnnnnnnnnnnnnnnnnnnnnnnnnnnnnnnnnnnnnnnnnnnnnnnnnnnnnnnnnnnnnnnnnnnnnnnnnnnnnnnnnnnnnnnnnnnnnnnnnnnnnnnnnnnnnnnnnnnnnnnnnnnnnnnnnnnnnnnnnnnnnnnnnnnnnnnnnnnnnnnnnnnnnnnnnnnnnnnnnnnnnnnnnnnnnnnnnnnnnnnnnnnnnnnnnnnnnnnnnnnnnnnnnnnnnnnnnnnnnnnnnnnnnnnnnnnnnnnnnnnnnnnnnnnnnnnnnnnnnnnnnnnnnnnnnnnnnnnnnnnnnnnnnnnnnnnnnnnnnnnnnnnnnnnnnnnnnnnnnnnnnnnnnnnnnnnnnnnnnnnnnnnnnnnnnnnnnnnnnnnnnnnnnnnnnnnnnnnnnnnnnnnnnnnnnnnnnnnnnnnnnnnnnnnnnnnnnnnnnnnnnnnnnnnnnnnnnnnnnnnnnnnnnnnnnnnnnnnnnnnnnnnnnnnnnnnnnnnnnnnnnnnnnnnnnnnnnnnnnnnnnnnnnnnnnnnnnnnnnnnnnnnnnnnnnnnnnnnnnnnnnnnnnnnnnnnnnnnnnnnnnnnnnnnnnnnnnnnnnnnnnnnnnnnnnnnnnnnnnnnnnnnnnnnnnnnnnnnnnnnnnnnnnnnnnnnnnnnnnnnnnnnnnnnnnnnnnnnnnnnnnnnnnnnnnnnnnnnnnnnnnnnnnnnnnnnnnnnnnnnnnnnnnnnnnnnnnnnnnnnnnnnnnnnnnnnnnnnnnnnnnnnnnnnnnnnnnnnnnnnnnnnnnnnnnnnnnnnnnnnnnnnnnnnnnnnnnnnnnnnnnnnnnnnnnnnnnnnnnnnnnnnnnnnnnnnnnnnnnnnnnnnnnnnnnnnnnnnnnnnnnnnnnnnnnnnnnnnnnnnnnnnnnnnnnnnnnnnnnnnnnnnnnnnnnnnnnnnnnnnnnnnnnnnnnnnnnnnnnnnnnnnnnnnnnnnnnnnnnnnnnnnnnnnnnnnnnnnnnnnnnnnnnnnnnnnnnnnnnnnnnnnnnnnnnnnnnnnnnnnnnnnnnnnnnnnnnnnnnnnnnnnnnnnnnnnnnnnnnnnnnnnnnnnnnnnnnnnnnnnnnnnnnnnnnnnnnnnnnnnnnnnnnnnnnnnnnnnnnnnnnnnnnnnnnnnnnnnnnnnnnnnnnnnnnnnnnnnnnnnnnnnnnnnnnnnnnnnnnnnnnnnnnnnnnnnnnnnnnnnnnnnnnnnnnnnnnnnnnnnnnnnnnnnnnnnnnnnnnnnnnnnnnnnnnnnnnnnnnnnnnnnnnnnnnnnnnnnnnnnnnnnnnnnnnnnnnnnnnnnnnnnnnnnnnnnnnnnnnnnnnnnnnnnnnnnnnnnnnnnnnnnnnnnnnnnnnnnnnnnnnnnnnnnnnnnnnnnnnnnnnnnnnnnnnnnnnnnnnnnnnnnnnnnnnnnnnnnnnnnnnnnnnnnnnnnnnnnnnnnnnnnnnnnnnnnnnnnnnnnnnnnnnnnnnnnnnnnnnnnnnnnnnnnnnnnnnnnnnnnnnnnnnnnnnnnnnnnnnnnnnnnnnnnnnnnnnnnnnnnnnnnnnnnnnnnnnnnnnnnnnnnnnnnnnnnnnnnnnnnnnnnnnnnnnnnnnnnnnnnnnnnnnnnnnnnnnnnnnnnnnnnnnnnnnnnnnnnnnnnnnnnnnnnnnnnnnnnnnnnnnnnnnnnnnnnnnnnnnnnnnnnnnnnnnnnnnnnnnnnnnnnnnnnnnnnnnnnnnnnnnnnnnnnnnnnnnnnnnnnnnnnnnnnnnnnnnnnnnnnnnnnnnnnnnnnnnnnnnnnnnnnnnnnnnnnnnnnnnnnnnnnnnnnnnnnnnnnnnnnnnnnnnnnnnnnnnnnnnnnnnnnnnnnnnnnnnnnnnnnnnnnnnnnnnnnnnnnnnnnnnnnnnnnnnnnnnnnnnnnnnnnnnnnnnnnnnnnnnnnnnnnnnnnnnnnnnnnnnnnnnnnnnnnnnnnnnnnnnnnnnnnnnnnnnnnnnnnnnnnnnnnnnnnnnnnnnnnnnnnnnnnnnnnnnnnnnnnnnnnnnnnnnnnnnnnnnnnnnnnnnnnnnnnnnnnnnnnnnnnnnnnnnnnnnnnnnnnnnnnnnnnnnnnnnnnnnnnnnnnnnnnnnnnnnnnnnnnnnnnnnnnnnnnnnnnnnnnnnnnnnnnnnnnnnnnnnnnnnnnnnnnnnnnnnnnnnnnnnnnnnnnnnnnnnnnnnnnnnnnnnnnnnnnnnnnnnnnnnnnnnnnnnnnnnnnnnnnnnnnnnnnnnnnnnnnnnnnnnnnnnnnnnnnnnnnnnnnnnnnnnnnnnnnnnnnnnnnnnnnnnnnnnnnnnnnnnnnnnnnnnnnnnnnnnnnnnnnnnnnnnnnnnnnnnnnnnnnnnnnnnnnnnnnnnnnnnnnnnnnnnnnnnnnnnnnnnnnnnnnnnnnnnnnnnnnnnnnnnnnnnnnnnnnnnnnnnnnnnnnnnnnnnnnnnnnnnnnnnnnnnnnnnnnnnnnnnnnnnnnnnnnnnnnnnnnnnnnnnnnnnnnnnnnnnnnnnnnnnnnnnnnnnnnnnnnnnnnnnnnnnnnnnnnnnnnnnnnnnnnnnnnnnnnnnnnnnnnnnnnnnnnnnnnnnnnnnnnnnnnnnnnnnnnnnnnnnnnnnnnnnnnnnnnnnnnnnnnnnnnnnnnnnnnnnnnnnnnnnnnnnnnnnnnnnnnnnnnnnnnnnnnnnnnnnnnnnnnnnnnnnnnnnnnnnnnnnnnnnnnnnnnnnnnnnnnnnnnnnnnnnnnnnnnnnnnnnnnnnnnnnnnnnnnnnnnnnnnnnnnnnnnnnnnnnnnnnnnnnnnnnnnnnnnnnnnnnnnnnnnnnnnnnnnnnnnnnnnnnnnnnnnnnnnnnnnnnnnnnnnnnnnnnnnnnnnnnnnnnnnnnnnnnnnnnnnnnnnnnnnnnnnnnnnnnnnnnnnnnnnnnnnnnnnnnnnnnnnnnnnnnnnnnnnnnnnnnnnnnnnnnnnnnnnnnnnnnnnnnnnnnnnnnnnnnnnnnnnnnnnnnnnnnnnnnnnnnnnnnnnnnnnnnnnnnnnnnnnnnnnnnnnnnnnnnnnnnnnnnnnnnnnnnnnnnnnnnnnnnnnnnnnnnnnnnnnnnnnnnnnnnnnnnnnnnnnnnnnnnnnnnnnnnnnnnnnnnnnnnnnnnnnnnnnnnnnnnnnnnnnnnnnnnnnnnnnnnnnnnnnnnnnnnnnnnnnnnnnnnnnnnnnnnnnnnnnnnnnnnnnnnnnnnnnnnnnnnnnnnnnnnnnnnnnnnnnnnnnnnnnnnnnnnnnnnnnnnnnnnnnnnnnnnnnnnnnnnnnnnnnnnnnnnnnnnnnnnnnnnnnnnnnnnnnnnnnnnnnnnnnnnnnnnnnnnnnnnnnnnnnnnnnnnnnnnnnnnnnnnnnnnnnnnnnnnnnnnnnnnnnnnnnnnnnnnnnnnnnnnnnnnnnnnnnnnnnnnnnnnnnnnnnnnnnnnnnnnnnnnnnnnnnnnnnnnnnnnnnnnnnnnnnnnnnnnnnnnnnnnnnnnnnnnnnnnnnnnnnnnnnnnnnnnnnnnnnnnnnnnnnnnnnnnnnnnnnnnnnnnnnnnnnnnnnnnnnnnnnnnnnnnnnnnnnnnnnnnnnnnnnnnnnnnnnnnnnnnnnnnnnnnnnnnnnnnnnnnnnnnnnnnnnnnnnnnnnnnnnnnnnnnnnnnnnnnnnnnnnnnnnnnnnnnnnnnnnnnnnnnnnnnnnnnnnnnnnnnnnnnnnnnnnnnnnnnnnnnnnnnnnnnnnnnnnnnnnnnnnnnnnnnnnnnnnnnnnnnnnnnnnnnnnnnnnnnnnnnnnnnnnnnnnnnnnnnnnnnnnnnnnnnnnnnnnnnnnnnnnnnnnnnnnnnnnnnnnnnnnnnnnnnnnnnnnnnnnnnnnnnnnnnnnnnnnnnnnnnnnnnnnnnnnnnnnnnnnnnnnnnnnnnnnnnnnnnnnnnnnnnnnnnnnnnnnnnnnnnnnnnnnnnnnnnnnnnnnnnnnnnnnnnnnnnnnnnnnnnnnnnnnnnnnnnnnnnnnnnnnnnnnnnnnnnnnnnnnnnnnnnnnnnnnnnnnnnnnnnnnnnnnnnnnnnnnnnnnnnnnnnnnnnnnnnnnnnnnnnnnnnnnnnnnnnnnnnnnnnnnnnnnnnnnnnnnnnnnnnnnnnnnnnnnnnnnnnnnnnnnnnnnnnnnnnnnnnnnnnnnnnnnnnnnnnnnnnnnnnnnnnnnnnnnnnnnnnnnnnnnnnnnnnnnnnnnnnnnnnnnnnnnnnnnnnnnnnnnnnnnnnnnnnnnnnnnnnnnnnnnnnnnnnnnnnnnnnnnnnnnnnnnnnnnnnnnnnnnnnnnnnnnnnnnnnnnnnnnnnnnnnnnnnnnnnnnnnnnnnnnnnnnnnnnnnnnnnnnnnnnnnnnnnnnnnnnnnnnnnnnnnnnnnnnnnnnnnnnnnnnnnnnnnnnnnnnnnnnnnnnnnnnnnnnnnnnnnnnnnnnnnnnnnnnnnnnnnnnnnnnnnnnnnnnnnnnnnnnnnnnnnnnnnnnnnnnnnnnnnnnnnnnnnnnnnnnnnnnnnnnnnnnnnnnnnnnnnnnnnnnnnnnnnnnnnnnnnnnnnnnnnnnnnnnnnnnnnnnnnnnnnnnnnnnnnnnnnnnnnnnnnnnnnnnnnnnnnnnnnnnnnnnnnnnnnnnnnnnnnnnnnnnnnnnnnnnnnnnnnnnnnnnnnnnnnnnnnnnnnnnnnnnnnnnnnnnnnnnnnnnnnnnnnnnnnnnnnnnnnnnnnnnnnnnnnnnnnnnnnnnnnnnnnnnnnnnnnnnnnnnnnnnnnnnnnnnnnnnnnnnnnnnnnnnnnnnnnnnnnnnnnnnnnnnnnnnnnnnnnnnnnnnnnnnnnnnnnnnnnnnnnnnnnnnnnnnnnnnnnnnnnnnnnnnnnnnnnnnnnnnnnnnnnnnnnnnnnnnnnnnnnnnnnnnnnnnnnnnnnnnnnnnnnnnnnnnnnnnnnnnnnnnnnnnnnnnnnnnnnnnnnnnnnnnnnnnnnnnnnnnnnnnnnnnnnnnnnnnnnnnnnnnnnnnnnnnnnnnnnnnnnnnnnnnnnnnnnnnnnnnnnnnnnnnnnnnnnnnnnnnnnnnnnnnnnnnnnnnnnnnnnnnnnnnnnnnnnnnnnnnnnnnnnnnnnnnnnnnnnnnnnnnnnnnnnnnnnnnnnnnnnnnnnnnnnnnnnnnnnnnnnnnnnnnnnnnnnnnnnnnnnnnnnnnnnnnnnnnnnnnnnnnnnnnnnnnnnnnnnnnnnnnnnnnnnnnnnnnnnnnnnnnnnnnnnnnnnnnnnnnnnnnnnnnnnnnnnnnnnnnnnnnnnnnnnnnnnnnnnnnnnnnnnnnnnnnnnnnnnnnnnnnnnnnnnnnnnnnnnnnnnnnnnnnnnnnnnnnnnnnnnnnnnnnnnnnnnnnnnnnnnnnnnnnnnnnnnnnnnnnnnnnnnnnnnnnnnnnnnnnnnnnnnnnnnnnnnnnnnnnnnnnnnnnnnnnnnnnnnnnnnnnnnnnnnnnnnnnnnnnnnnnnnnnnnnnnnnnnnnnnnnnnnnnnnnnnnnnnnnnnnnnnnnnnnnnnnnnnnnnnnnnnnnnnnnnnnnnnnnnnnnnnnnnnnnnnnnnnnnnnnnnnnnnnnnnnnnnnnnnnnnnnnnnnnnnnnnnnnnnnnnnnnnnnnnnnnnnnnnnnnnnnnnnnnnnnnnnnnnnnnnnnnnnnnnnnnnnnnnnnnnnnnnnnnnnnnnnnnnnnnnnnnnnnnnnnnnnnnnnnnnnnnnnnnnnnnnnnnnnnnnnnnnnnnnnnnnnnnnnnnnnnnnnnnnnnnnnnnnnnnnnnnnnnnnnnnnnnnnnnnnnnnnnnnnnnnnnnnnnnnnnnnnnnnnnnnnnnnnnnnnnnnnnnnnnnnnnnnnnnnnnnnnnnnnnnnnnnnnnnnnnnnnnnnnnnnnnnnnnnnnnnnnnnnnnnnnnnnnnnnnnnnnnnnnnnnnnnnnnnnnnnnnnnnnnnnnnnnnnnnnnnnnnnnnnnnnnnnnnnnnnnnnnnnnnnnnnnnnnnnnnnnnnnnnnnnnnnnnnnnnnnnnnnnnnnnnnnnnnnnnnnnnnnnnnnnnnnnnnnnnnnnnnnnnnnnnnnnnnnnnnnnnnnnnnnnnnnnnnnnnnnnnnnnnnnnnnnnnnnnnnnnnnnnnnnnnnnnnnnnnnnnnnnnnnnnnnnnnnnnnnnnnnnnnnnnnnnnnnnnnnnnnnnnnnnnnnnnnnnnnnnnnnnnnnnnnnnnnnnnnnnnnnnnnnnnnnnnnnnnnnnnnnnnnnnnnnnnnnnnnnnnnnnnnnnnnnnnnnnnnnnnnnnnnnnnnnnnnnnnnnnnnnnnnnnnnnnnnnnnnnnnnnnnnnnnnnnnnnnnnnnnnnnnnnnnnnnnnnnnnnnnnnnnnnnnnnnnnnnnnnnnnnnnnnnnnnnnnnnnnnnnnnnnnnnnnnnnnnnnnnnnnnnnnnnnnnnnnnnnnnnnnnnnnnnnnnnnnnnnnnnnnnnnnnnnnnnnnnnnnnnnnnnnnnnnnnnnnnnnnnnnnnnnnnnnnnnnnnnnnnnnnnnnnnnnnnnnnnnnnnnnnnnnnnnnnnnnnnnnnnnnnnnnnnnnnnnnnnnnnnnnnnnnnnnnnnnnnnnnnnnnnnnnnnnnnnnnnnnnnnnnnnnnnnnnnnnnnnnnnnnnnnnnnnnnnnnnnnnnnnnnnnnnnnnnnnnnnnnnnnnnnnnnnnnnnnnnnnnnnnnnnnnnnnnnnnnnnnnnnnnnnnnnnnnnnnnnnnnnnnnnnnnnnnnnnnnnnnnnnnnnnnnnnnnnnnnnnnnnnnnnnnnnnnnnnnnnnnnnnnnnnnnnnnnnnnnnnnnnnnnnnnnnnnnnnnnnnnnnnnnnnnnnnnnnnnnnnnnnnnnnnnnnnnnnnnnnnnnnnnnnnnnnnnnnnnnnnnnnnnnnnnnnnnnnnnnnnnnnnnnnnnnnnnnnnnnnnnnnnnnnnnnnnnnnnnnnnnnnnnnnnnnnnnnnnnnnnnnnnnnnnnnnnnnnnnnnnnnnnnnnnnnnnnnnnnnnnnnnnnnnnnnnnnnnnnnnnnnnnnnnnnnnnnnnnnnnnnnnnnnnnnnnnnnnnnnnnnnnnnnnnnnnnnnnnnnnnnnnnnnnnnnnnnnnnnnnnnnnnnnnnnnnnnnnnnnnnnnnnnnnnnnnnnnnnnnnnnnnnnnnnnnnnnnnnnnnnnnnnnnnnnnnnnnnnnnnnnnnnnnnnnnnnnnnnnnnnnnnnnnnnnnnnnnnnnnnnnnnnnnnnnnnnnnnnnnnnnnnnnnnnnnnnnnnnnnnnnnnnnnnnnnnnnnnnnnnnnnnnnnnnnnnnnnnnnnnnnnnnnnnnnnnnnnnnnnnnnnnnnnnnnnnnnnnnnnnnnnnnnnnnnnnnnnnnnnnnnnnnnnnnnnnnnnnnnnnnnnnnnnnnnnnnnnnnnnnnnnnnnnnnnnnnnnnnnnnnnnnnnnnnnnnnnnnnnnnnnnnnnnnnnnnnnnnnnnnnnnnnnnnnnnnnnnnnnnnnnnnnnnnnnnnnnnnnnnnnnnnnnnnnnnnnnnnnnnnnnnnnnnnnnnnnnnnnnnnnnnnnnnnnnnnnnnnnnnnnnnnnnnnnnnnnnnnnnnnnnnnnnnnnnnnnnnnnnnnnnnnnnnnnnnnnnnnnnnnnnnnnnnnnnnnnnnnnnnnnnnnnnnnnnnnnnnnnnnnnnnnnnnnnnnnnnnnnnnnnnnnnnnnnnnnnnnnnnnnnnnnnnnnnnnnnnnnnnnnnnnnnnnnnnnnnnnnnnnnnnnnnnnnnnnnnnnnnnnnnnnnnnnnnnnnnnnnnnnnnnnnnnnnnnnnnnnnnnnnnnnnnnnnnnnnnnnnnnnnnnnnnnnnnnnnnnnnnnnnnnnnnnnnnnnnnnnnnnnnnnnnnnnnnnnnnnnnnnnnnnnnnnnnnnnnnnnnnnnnnnnnnnnnnnnnnnnnnnnnnnnnnnnnnnnnnnnnnnnnnnnnnnnnnnnnnnnnnnnnnnnnnnnnnnnnnnnnnnnnnnnnnnnnnnnnnnnnnnnnnnnnnnnnnnnnnnnnnnnnnnnnnnnnnnnnnnnnnnnnnnnnnnnnnnnnnnnnnnnnnnnnnnnnnnnnnnnnnnnnnnnnnnnnnnnnnnnnnnnnnnnnnnnnnnnnnnnnnnnnnnnnnnnnnnnnnnnnnnnnnnnnnnnnnnnnnnnnnnnnnnnnnnnnnnnnnnnnnnnnnnnnnnnnnnnnnnnnnnnnnnnnnnnnnnnnnnnnnnnnnnnnnnnnnnnnnnnnnnnnnnnnnnnnnnnnnnnnnnnnnnnnnnnnnnnnnnnnnnnnnnnnnnnnnnnnnnnnnnnnnnnnnnnnnnnnnnnnnnnnnnnnnnnnnnnnnnnnnnnnnnnnnnnnnnnnnnnnnnnnnnnnnnnnnnnnnnnnnnnnnnnnnnnnnnnnnnnnnnnnnnnnnnnnnnnnnnnnnnnnnnnnnnnnnnnnnnnnnnnnnnnnnnnnnnnnnnnnnnnnnnnnnnnnnnnnnnnnnnnnnnnnnnnnnnnnnnnnnnnnnnnnnnnnnnnnnnnnnnnnnnnnnnnnnnnnnnnnnnnnnnnnnnnnnnnnnnnnnnnnnnnnnnnnnnnnnnnnnnnnnnnnnnnnnnnnnnnnnnnnnnnnnnnnnnnnnnnnnnnnnnnnnnnnnnnnnnnnnnnnnnnnnnnnnnnnnnnnnnnnnnnnnnnnnnnnnnnnnnnnnnnnnnnnnnnnnnnnnnnnnnnnnnnnnnnnnnnnnnnnnnnnnnnnnnnnnnnnnnnnnnnnnnnnnnnnnnnnnnnnnnnnnnnnnnnnnnnnnnnnnnnnnnnnnnnnnnnnnnnnnnnnnnnnnnnnnnnnnnnnnnnnnnnnnnnnnnnnnnnnnnnnnnnnnnnnnnnnnnnnnnnnnnnnnnnnnnnnnnnnnnnnnnnnnnnnnnnnnnnnnnnnnnnnnnnnnnnnnnnnnnnnnnnnnnnnnnnnnnnnnnnnnnnnnnnnnnnnnnnnnnnnnnnnnnnnnnnnnnnnnnnnnnnnnnnnnnnnnnnnnnnnnnnnnnnnnnnnnnnnnnnnnnnnnnnnnnnnnnnnnnnnnnnnnnnnnnnnnnnnnnnnnnnnnnnnnnnnnnnnnnnnnnnnnnnnnnnnnnnnnnnnnnnnnnnnnnnnnnnnnnnnnnnnnnnnnnnnnnnnnnnnnnnnnnnnnnnnnnnnnnnnnnnnnnnnnnnnnnnnnnnnnnnnnnnnnnnnnnnnnnnnnnnnnnnnnnnnnnnnnnnnnnnnnnnnnnnnnnnnnnnnnnnnnnnnnnnnnnnnnnnnnnnnnnnnnnnnnnnnnnnnnnnnnnnnnnnnnnnnnnnnnnnnnnnnnnnnnnnnnnnnnnnnnnnnnnnnnnnnnnnnnnnnnnnnnnnnnnnnnnnnnnnnnnnnnnnnnnnnnnnnnnnnnnnnnnnnnnnnnnnnnnnnnnnnnnnnnnnnnnnnnnnnnnnnnnnnnnnnnnnnnnnnnnnnnnnnnnnnnnnnnnnnnnnnnnnnnnnnnnnnnnnnnnnnnnnnnnnnnnnnnnnnnnnnnnnnnnnnnnnnnnnnnnnnnnnnnnnnnnnnnnnnnnnnnnnnnnnnnnnnnnnnnnnnnnnnnnnnnnnnnnnnnnnnnnnnnnnnnnnnnnnnnnnnnnnnnnnnnnnnnnnnnnnnnnnnnnnnnnnnnnnnnnnnnnnnnnnnnnnnnnnnnnnnnnnnnnnnnnnnnnnnnnnnnnnnnnnnnnnnnnnnnnnnnnnnnnnnnnnnnnnnnnnnnnnnnnnnnnnnnnnnnnnnnnnnnnnnnnnnnnnnnnnnnnnnnnnnnnnnnnnnnnnnnnnnnnnnnnnnnnnnnnnnnnnnnnnnnnnnnnnnnnnnnnnnnnnnnnnnnnnnnnnnnnnnnnnnnnnnnnnnnnnnnnnnnnnnnnnnnnnnnnnnnnnnnnnnnnnnnnnnnnnnnnnnnnnnnnnnnnnnnnnnnnnnnnnnnnnnnnnnnnnnnnnnnnnnnnnnnnnnnnnnnnnnnnnnnnnnnnnnnnnnnnnnnnnnnnnnnnnnnnnnnnnnnnnnnnnnnnnnnnnnnnnnnnnnnnnnnnnnnnnnnnnnnnnnnnnnnnnnnnnnnnnnnnnnnnnnnnnnnnnnnnnnnnnnnnnnnnnnnnnnnnnnnnnnnnnnnnnnnnnnnnnnnnnnnnnnnnnnnnnnnnnnnnnnnnnnnnnnnnnnnnnnnnnnnnnnnnnnnnnnnnnnnnnnnnnnnnnnnnnnnnnnnnnnnnnnnnnnnnnnnnnnnnnnnnnnnnnnnnnnnnnnnnnnnnnnnnnnnnnnnnnnnnnnnnnnnnnnnnnnnnnnnnnnnnnnnnnnnnnnnnnnnnnnnnnnnnnnnnnnnnnnnnnnnnnnnnnnnnnnnnnnnnnnnnnnnnnnnnnnnnnnnnnnnnnnnnnnnnnnnnnnnnnnnnnnnnnnnnnnnnnnnnnnnnnnnnnnnnnnnnnnnnnnnnnnnnnnnnnnnnnnnnnnnnnnnnnnnnnnnnnnnnnnnnnnnnnnnnnnnnnnnnnnnnnnnnnnnnnnnnnnnnnnnnnnnnnnnnnnnnnnnnnnnnnnnnnnnnnnnnnnnnnnnnnnnnnnnnnnnnnnnnnnnnnnnnnnnnnnnnnnnnnnnnnnnnnnnnnnnnnnnnnnnnnnnnnnnnnnnnnnnnnnnnnnnnnnnnnnnnnnnnnnnnnnnnnnnnnnnnnnnnnnnnnnnnnnnnnnnnnnnnnnnnnnnnnnnnnnnnnnnnnnnnnnnnnnnnnnnnnnnnnnnnnnnnnnnnnnnnnnnnnnnnnnnnnnnnnnnnnnnnnnnnnnnnnnnnnnnnnnnnnnnnnnnnnnnnnnnnnnnnnnnnnnnnnnnnnnnnnnnnnnnnnnnnnnnnnnnnnnnnnnnnnnnnnnnnnnnnnnnnnnnnnnnnnnnnnnnnnnnnnnnnnnnnnnnnnnnnnnnnnnnnnnnnnnnnnnnnnnnnnnnnnnnnnnnnnnnnnnnnnnnnnnnnnnnnnnnnnnnnnnnnnnnnnnnnnnnnnnnnnnnnnnnnnnnnnnnnnnnnnnnnnnnnnnnnnnnnnnnnnnnnnnnnnnnnnnnnnnnnnnnnnnnnnnnnnnnnnnnnnnnnnnnnnnnnnnnnnnnnnnnnnnnnnnnnnnnnnnnnnnnnnnnnnnnnnnnnnnnnnnnnnnnnnnnnnnnnnnnnnnnnnnnnnnnnnnnnnnnnnnnnnnnnnnnnnnnnnnnnnnnnnnnnnnnnnnnnnnnnnnnnnnnnnnnnnnnnnnnnnnnnnnnnnnnnnnnnnnnnnnnnnnnnnnnnnnnnnnnnnnnnnnnnnnnnnnnnnnnnnnnnnnnnnnnnnnnnnnnnnnnnnnnnnnnnnnnnnnnnnnnnnnnnnnnnnnnnnnnnnnnnnnnnnnnnnnnnnnnnnnnnnnnnnnnnnnnnnnnnnnnnnnnnnnnnnnnnnnnnnnnnnnnnnnnnnnnnnnnnnnnnnnnnnnnnnnnnnnnnnnnnnnnnnnnnnnnnnnnnnnnnnnnnnnnnnnnnnnnnnnnnnnnnnnnnnnnnnnnnnnnnnnnnnnnnnnnnnnnnnnnnnnnnnnnnnnnnnnnnnnnnnnnnnnnnnnnnnnnnnnnnnnnnnnnnnnnnnnnnnnnnnnnnnnnnnnnnnnnnnnnnnnnnnnnnnnnnnnnnnnnnnnnnnnnnnnnnnnnnnnnnnnnnnnnnnnnnnnnnnnnnnnnnnnnnnnnnnnnnnnnnnnnnnnnnnnnnnnnnnnnnnnnnnnnnnnnnnnnnnnnnnnnnnnnnnnnnnnnnnnnnnnnnnnnnnnnnnnnnnnnnnnnnnnnnnnnnnnnnnnnnnnnnnnnnnnnnnnnnnnnnnnnnnnnnnnnnnnnnnnnnnnnnnnnnnnnnnnnnnnnnnnnnnnnnnnnnnnnnnnnnnnnnnnnnnnnnnnnnnnnnnnnnnnnnnnnnnnnnnnnnnnnnnnnnnnnnnnnnnnnnnnnnnnnnnnnnnnnnnnnnnnnnnnnnnnnnnnnnnnnnnnnnnnnnnnnnnnnnnnnnnnnnnnnnnnnnnnnnnnnnnnnnnnnnnnnnnnnnnnnnnnnnnnnnnnnnnnnnnnnnnnnnnnnnnnnnnnnnnnnnnnnnnnnnnnnnnnnnnnnnnnnnnnnnnnnnnnnnnnnnnnnnnnnnnnnnnnnnnnnnnnnnnnnnnnnnnnnnnnnnnnnnnnnnnnnnnnnnnnnnnnnnnnnnnnnnnnnnnnnnnnnnnnnnnnnnnnnnnnnnnnnnnnnnnnnnnnnnnnnnnnnnnnnnnnnnnnnnnnnnnnnnnnnnnnnnnnnnnnnnnnnnnnnnnnnnnnnnnnnnnnnnnnnnnnnnnnnnnnnnnnnnnnnnnnnnnnnnnnnnnnnnnnnnnnnnnnnnnnnnnnnnnnnnnnnnnnnnnnnnnnnnnnnnnnnnnnnnnnnnnnnnnnnnnnnnnnnnnnnnnnnnnnnnnnnnnnnnnnnnnnnnnnnnnnnnnnnnnnnnnnnnnnnnnnnnnnnnnnnnnnnnnnnnnnnnnnnnnnnnnnnnnnnnnnnnnnnnnnnnnnnnnnnnnnnnnnnnnnnnnnnnnnnnnnnnnnnnnnnnnnnnnnnnnnnnnnnnnnnnnnnnnnnnnnnnnnnnnnnnnnnnnnnnnnnnnnnnnnnnnnnnnnnnnnnnnnnnnnnnnnnnnnnnnnnnnnnnnnnnnnnnnnnnnnnnnnnnnnnnnnnnnnnnnnnnnnnnnnnnnnnnnnnnnnnnnnnnnnnnnnnnnnnnnnnnnnnnnnnnnnnnnnnnnnnnnnnnnnnnnnnnnnnnnnnnnnnnnnnnnnnnnnnnnnnnnnnnnnnnnnnnnnnnnnnnnnnnnnnnnnnnnnnnnnnnnnnnnnnnnnnnnnnnnnnnnnnnnnnnnnnnnnnnnnnnnnnnnnnnnnnnnnnnnnnnnnnnnnnnnnnnnnnnnnnnnnnnnnnnnnnnnnnnnnnnnnnnnnnnnnnnnnnnnnnnnnnnnnnnnnnnnnnnnnnnnnnnnnnnnnnnnnnnnnnnnnnnnnnnnnnnnnnnnnnnnnnnnnnnnnnnnnnnnnnnnnnnnnnnnnnnnnnnnnnnnnnnnnnnnnnnnnnnnnnnnnnnnnnnnnnnnnnnnnnnnnnnnnnnnnnnnnnnnnnnnnnnnnnnnnnnnnnnnnnnnnnnnnnnnnnnnnnnnnnnnnnnnnnnnnnnnnnnnnnnnnnnnnnnnnnnnnnnnnnnnnnnnnnnnnnnnnnnnnnnnnnnnnnnnnnnnnnnnnnnnnnnnnnnnnnnnnnnnnnnnnnnnnnnnnnnnnnnnnnnnnnnnnnnnnnnnnnnnnnnnnnnnnnnnnnnnnnnnnnnnnnnnnnnnnnnnnnnnnnnnnnnnnnnnnnnnnnnnnnnnnnnnnnnnnnnnnnnnnnnnnnnnnnnnnnnnnnnnnnnnnnnnnnnnnnnnnnnnnnnnnnnnnnnnnnnnnnnnnnnnnnnnnnnnnnnnnnnnnnnnnnnnnnnnnnnnnnnnnnnnnnnnnnnnnnnnnnnnnnnnnnnnnnnnnnnnnnnnnnnnnnnnnnnnnnnnnnnnnnnnnnnnnnnnnnnnnnnnnnnnnnnnnnnnnnnnnnnnnnnnnnnnnnnnnnnnnnnnnnnnnnnnnnnnnnnnnnnnnnnnnnnnnnnnnnnnnnnnnnnnnnnnnnnnnnnnnnnnnnnnnnnnnnnnnnnnnnnnnnnnnnnnnnnnnnnnnnnnnnnnnnnnnnnnnnnnnnnnnnnnnnnnnnnnnnnnnnnnnnnnnnnnnnnnnnnnnnnnnnnnnnnnnnnnnnnnnnnnnnnnnnnnnnnnnnnnnnnnnnnnnnnnnnnnnnnnnnnnnnnnnnnnnnnnnnnnnnnnnnnnnnnnnnnnnnnnnnnnnnnnnnnnnnnnnnnnnnnnnnnnnnnnnnnnnnnnnnnnnnnnnnnnnnnnnnnnnnnnnnnnnnnnnnnnnnnnnnnnnnnnnnnnnnnnnnnnnnnnnnnnnnnnnnnnnnnnnnnnnnnnnnnnnnnnnnnnnnnnnnnnnnnnnnnnnnnnnnnnnnnnnnnnnnnnnnnnnnnnnnnnnnnnnnnnnnnnnnnnnnnnnnnnnnnnnnnnnnnnnnnnnnnnnnnnnnnnnnnnnnnnnnnnnnnnnnnnnnnnnnnnnnnnnnnnnnnnnnnnnnnnnnnnnnnnnnnnnnnnnnnnnnnnnnnnnnnnnnnnnnnnnnnnnnnnnnnnnnnnnnnnnnnnnnnnnnnnnnnnnnnnnnnnnnnnnnnnnnnnnnnnnnnnnnnnnnnnnnnnnnnnnnnnnnnnnnnnnnnnnnnnnnnnnnnnnnnnnnnnnnnnnnnnnnnnnnnnnnnnnnnnnnnnnnnnnnnnnnnnnnnnnnnnnnnnnnnnnnnnnnnnnnnnnnnnnnnnnnnnnnnnnnnnnnnnnnnnnnnnnnnnnnnnnnnnnnnnnnnnnnnnnnnnnnnnnnnnnnnnnnnnnnnnnnnnnnnnnnnnnnnnnnnnnnnnnnnnnnnnnnnnnnnnnnnnnnnnnnnnnnnnnnnnnnnnnnnnnnnnnnnnnnnnnnnnnnnnnnnnnnnnnnnnnnnnnnnnnnnnnnnnnnnnnnnnnnnnnnnnnnnnnnnnnnnnnnnnnnnnnnnnnnnnnnnnnnnnnnnnnnnnnnnnnnnnnnnnnnnnnnnnnnnnnnnnnnnnnnnnnnnnnnnnnnnnnnnnnnnnnnnnnnnnnnnnnnnnnnnnnnnnnnnnnnnnnnnnnnnnnnnnnnnnnnnnnnnnnnnnnnnnnnnnnnnnnnnnnnnnnnnnnnnnnnnnnnnnnnnnnnnnnnnnnnnnnnnnnnnnnnnnnnnnnnnnnnnnnnnnnnnnnnnnnnnnnnnnnnnnnnnnnnnnnnnnnnnnnnnnnnnnnnnnnnnnnnnnnnnnnnnnnnnnnnnnnnnnnnnnnnnnnnnnnnnnnnnnnnnnnnnnnnnnnnnnnnnnnnnnnnnnnnnnnnnnnnnnnnnnnnnnnnnnnnnnnnnnnnnnnnnnnnnnnnnnnnnnnnnnnnnnnnnnnnnnnnnnnnnnnnnnnnnnnnnnnnnnnnnnnnnnnnnnnnnnnnnnnnnnnnnnnnnnnnnnnnnnnnnnnnnnnnnnnnnnnnnnnnnnnnnnnnnnnnnnnnnnnnnnnnnnnnnnnnnnnnnnnnnnnnnnnnnnnnnnnnnnnnnnnnnnnnnnnnnnnnnnnnnnnnnnnnnnnnnnnnnnnnnnnnnnnnnnnnnnnnnnnnnnnnnnnnnnnnnnnnnnnnnnnnnnnnnnnnnnnnnnnnnnnnnnnnnnnnnnnnnnnnnnnnnnnnnnnnnnnnnnnnnnnnnnnnnnnnnnnnnnnnnnnnnnnnnnnnnnnnnnnnnnnnnnnnnnnnnnnnnnnnnnnnnnnnnnnnnnnnnnnnnnnnnnnnnnnnnnnnnnnnnnnnnnnnnnnnnnnnnnnnnnnnnnnnnnnnnnnnnnnnnnnnnnnnnnnnnnnnnnnnnnnnnnnnnnnnnnnnnnnnnnnnnnnnnnnnnnnnnnnnnnnnnnnnnnnnnnnnnnnnnnnnnnnnnnnnnnnnnnnnnnnnnnnnnnnnnnnnnnnnnnnnnnnnnnnnnnnnnnnnnnnnnnnnnnnnnnnnnnnnnnnnnnnnnnnnnnnnnnnnnnnnnnnnnnnnnnnnnnnnnnnnnnnnnnnnnnnnnnnnnnnnnnnnnnnnnnnnnnnnnnnnnnnnnnnnnnnnnnnnnnnnnnnnnnnnnnnnnnnnnnnnnnnnnnnnnnnnnnnnnnnnnnnnnnnnnnnnnnnnnnnnnnnnnnnnnnnnnnnnnnnnnnnnnnnnnnnnnnnnnnnnnnnnnnnnnnnnnnnnnnnnnnnnnnnnnnnnnnnnnnnnnnnnnnnnnnnnnnnnnnnnnnnnnnnnnnnnnnnnnnnnnnnnnnnnnnnnnnnnnnnnnnnnnnnnnnnnnnnnnnnnnnnnnnnnnnnnnnnnnnnnnnnnnnnnnnnnnnnnnnnnnnnnnnnnnnnnnnnnnnnnnnnnnnnnnnnnnnnnnnnnnnnnnnnnnnnnnnnnnnnnnnnnnnnnnnnnnnnnnnnnnnnnnnnnnnnnnnnnnnnnnnnnnnnnnnnnnnnnnnnnnnnnnnnnnnnnnnnnnnnnnnnnnnnnnnnnnnnnnnnnnnnnnnnnnnnnnnnnnnnnnnnnnnnnnnnnnnnnnnnnnnnnnnnnnnnnnnnnnnnnnnnnnnnnnnnnnnnnnnnnnnnnnnnnnnnnnnnnnnnnnnnnnnnnnnnnnnnnnnnnnnnnnnnnnnnnnnnnnnnnnnnnnnnnnnnnnnnnnnnnnnnnnnnnnnnnnnnnnnnnnnnnnnnnnnnnnnnnnnnnnnnnnnnnnnnnnnnnnnnnnnnnnnnnnnnnnnnnnnnnnnnnnnnnnnnnnnnnnnnnnnnnnnnnnnnnnnnnnnnnnnnnnnnnnnnnnnnnnnnnnnnnnnnnnnnnnnnnnnnnnnnnnnnnnnnnnnnnnnnnnnnnnnnnnnnnnnnnnnnnnnnnnnnnnnnnnnnnnnnnnnnnnnnnnnnnnnnnnnnnnnnnnnnnnnnnnnnnnnnnnnnnnnnnnnnnnnnnnnnnnnnnnnnnnnnnnnnnnnnnnnnnnnnnnnnnnnnnnnnnnnnnnnnnnnnnnnnnnnnnnnnnnnnnnnnnnnnnnnnnnnnnnnnnnnnnnnnnnnnnnnnnnnnnnnnnnnnnnnnnnnnnnnnnnnnnnnnnnnnnnnnnnnnnnnnnnnnnnnnnnnnnnnnnnnnnnnnnnnnnnnnnnnnnnnnnnnnnnnnnnnnnnnnnnnnnnnnnnnnnnnnnnnnnnnnnnnnnnnnnnnnnnnnnnnnnnnnnnnnnnnnnnnnnnnnnnnnnnnnnnnnnnnnnnnnnnnnnnnnnnnnnnnnnnnnnnnnnnnnnnnnnnnnnnnnnnnnnnnnnnnnnnnnnnnnnnnnnnnnnnnnnnnnnnnnnnnnnnnnnnnnnnnnnnnnnnnnnnnnnnnnnnnnnnnnnnnnnnnnnnnnnnnnnnnnnnnnnnnnnnnnnnnnnnnnnnnnnnnnnnnnnnnnnnnnnnnnnnnnnnnnnnnnnnnnnnnnnnnnnnnnnnnnnnnnnnnnnnnnnnnnnnnnnnnnnnnnnnnnnnnnnnnnnnnnnnnnnnnnnnnnnnnnnnnnnnnnnnnnnnnnnnnnnnnnnnnnnnnnnnnnnnnnnnnnnnnnnnnnnnnnnnnnnnnnnnnnnnnnnnnnnnnnnnnnnnnnnnnnnnnnnnnnnnnnnnnnnnnnnnnnnnnnnnnnnnnnnnnnnnnnnnnnnnnnnnnnnnnnnnnnnnnnnnnnnnnnnnnnnnnnnnnnnnnnnnnnnnnnnnnnnnnnnnnnnnnnnnnnnnnnnnnnnnnnnnnnnnnnnnnnnnnnnnnnnnnnnnnnnnnnnnnnnnnnnnnnnnnnnnnnnnnnnnnnnnnnnnnnnnnnnnnnnnnnnnnnnnnnnnnnnnnnnnnnnnnnnnnnnnnnnnnnnnnnnnnnnnnnnnnnnnnnnnnnnnnnnnnnnnnnnnnnnnnnnnnnnnnnnnnnnnnnnnnnnnnnnnnnnnnnnnnnnnnnnnnnnnnnnnnnnnnnnnnnnnnnnnnnnnnnnnnnnnnnnnnnnnnnnnnnnnnnnnnnnnnnnnnnnnnnnnnnnnnnnnnnnnnnnnnnnnnnnnnnnnnnnnnnnnnnnnnnnnnnnnnnnnnnnnnnnnnnnnnnnnnnnnnnnnnnnnnnnnnnnnnnnnnnnnnnnnnnnnnnnnnnnnnnnnnnnnnnnnnnnnnnnnnnnnnnnnnnnnnnnnnnnnnnnnnnnnnnnnnnnnnnnnnnnnnnnnnnnnnnnnnnnnnnnnnnnnnnnnnnnnnnnnnnnnnnnnnnnnnnnnnnnnnnnnnnnnnnnnnnnnnnnnnnnnnnnnnnnnnnnnnnnnnnnnnnnnnnnnnnnnnnnnnnnnnnnnnnnnnnnnnnnnnnnnnnnnnnnnnnnnnnnnnnnnnnnnnnnnnnnnnnnnnnnnnnnnnnnnnnnnnnnnnnnnnnnnnnnnnnnnnnnnnnnnnnnnnnnnnnnnnnnnnnnnnnnnnnnnnnnnnnnnnnnnnnnnnnnnnnnnnnnnnnnnnnnnnnnnnnnnnnnnnnnnnnnnnnnnnnnnnnnnnnnnnnnnnnnnnnnnnnnnnnnnnnnnnnnnnnnnnnnnnnnnnnnnnnnnnnnnnnnnnnnnnnnnnnnnnnnnnnnnnnnnnnnnnnnnnnnnnnnnnnnnnnnnnnnnnnnnnnnnnnnnnnnnnnnnnnnnnnnnnnnnnnnnnnnnnnnnnnnnnnnnnnnnnnnnnnnnnnnnnnnnnnnnnnnnnnnnnnnnnnnnnnnnnnnnnnnnnnnnnnnnnnnnnnnnnnnnnnnnnnnnnnnnnnnnnnnnnnnnnnnnnnnnnnnnnnnnnnnnnnnnnnnnnnnnnnnnnnnnnnnnnnnnnnnnnnnnnnnnnnnnnnnnnnnnnnnnnnnnnnnnnnnnnnnnnnnnnnnnnnnnnnnnnnnnnnnnnnnnnnnnnnnnnnnnnnnnnnnnnnnnnnnnnnnnnnnnnnnnnnnnnnnnnnnnnnnnnnnnnnnnnnnnnnnnnnnnnnnnnnnnnnnnnnnnnnnnnnnnnnnnnnnnnnnnnnnnnnnnnnnnnnnnnnnnnnnnnnnnnnnnnnnnnnnnnnnnnnnnnnnnnnnnnnnnnnnnnnnnnnnnnnnnnnnnnnnnnnnnnnnnnnnnnnnnnnnnnnnnnnnnnnnnnnnnnnnnnnnnnnnnnnnnnnnnnnnnnnnnnnnnnnnnnnnnnnnnnnnnnnnnnnnnnnnnnnnnnnnnnnnnnnnnnnnnnnnnnnnnnnnnnnnnnnnnnnnnnnnnnnnnnnnnnnnnnnnnnnnnnnnnnnnnnnnnnnnnnnnnnnnnnnnnnnnnnnnnnnnnnnnnnnnnnnnnnnnnnnnnnnnnnnnnnnnnnnnnnnnnnnnnnnnnnnnnnnnnnnnnnnnnnnnnnnnnnnnnnnnnnnnnnnnnnnnnnnnnnnnnnnnnnnnnnnnnnnnnnnnnnnnnnnnnnnnnnnnnnnnnnnnnnnnnnnnnnnnnnnnnnnnnnnnnnnnnnnnnnnnnnnnnnnnnnnnnnnnnnnnnnnnnnnnnnnnnnnnnnnnnnnnnnnnnnnnnnnnnnnnnnnnnnnnnnnnnnnnnnnnnnnnnnnnnnnnnnnnnnnnnnnnnnnnnnnnnnnnnnnnnnnnnnnnnnnnnnnnnnnnnnnnnnnnnnnnnnnnnnnnnnnnnnnnnnnnnnnnnnnnnnnnnnnnnnnnnnnnnnnnnnnnnnnnnnnnnnnnnnnnnnnnnnnnnnnnnnnnnnnnnnnnnnnnnnnnnnnnnnnnnnnnnnnnnnnnnnnnnnnnnnnnnnnnnnnnnnnnnnnnnnnnnnnnnnnnnnnnnnnnnnnnnnnnnnnnnnnnnnnnnnnnnnnnnnnnnnnnnnnnnnnnnnnnnnnnnnnnnnnnnnnnnnnnnnnnnnnnnnnnnnnnnnnnnnnnnnnnnnnnnnnnnnnnnnnnnnnnnnnnnnnnnnnnnnnnnnnnnnnnnnnnnnnnnnnnnnnnnnnnnnnnnnnnnnnnnnnnnnnnnnnnnnnnnnnnnnnnnnnnnnnnnnnnnnnnnnnnnnnnnnnnnnnnnnnnnnnnnnnnnnnnnnnnnnnnnnnnnnnnnnnnnnnnnnnnnnnnnnnnnnnnnnnnnnnnnnnnnnnnnnnnnnnnnnnnnnnnnnnnnnnnnnnnnnnnnnnnnnnnnnnnnnnnnnnnnnnnnnnnnnnnnnnnnnnnnnnnnnnnnnnnnnnnnnnnnnnnnnnnnnnnnnnnnnnnnnnnnnnnnnnnnnnnnnnnnnnnnnnnnnnnnnnnnnnnnnnnnnnnnnnnnnnnnnnnnnnnnnnnnnnnnnnnnnnnnnnnnnnnnnnnnnnnnnnnnnnnnnnnnnnnnnnnnnnnnnnnnnnnnnnnnnnnnnnnnnnnnnnnnnnnnnnnnnnnnnnnnnnnnnnnnnnnnnnnnnnnnnnnnnnnnnnnnnnnnnnnnnnnnnnnnnnnnnnnnnnnnnnnnnnnnnnnnnnnnnnnnnnnnnnnnnnnnnnnnnnnnnnnnnnnnnnnnnnnnnnnnnnnnnnnnnnnnnnnnnnnnnnnnnnnnnnnnnnnnnnnnnnnnnnnnnnnnnnnnnnnnnnnnnnnnnnnnnnnnnnnnnnnnnnnnnnnnnnnnnnnnnnnnnnnnnnnnnnnnnnnnnnnnnnnnnnnnnnnnnnnnnnnnnnnnnnnnnnnnnnnnnnnnnnnnnnnnnnnnnnnnnnnnnnnnnnnnnnnnnnnnnnnnnnnnnnnnnnnnnnnnnnnnnnnnnnnnnnnnnnnnnnnnnnnnnnnnnnnnnnnnnnnnnnnnnnnnnnnnnnnnnnnnnnnnnnnnnnnnnnnnnnnnnnnnnnnnnnnnnnnnnnnnnnnnnnnnnnnnnnnnnnnnnnnnnnnnnnnnnnnnnnnnnnnnnnnnnnnnnnnnnnnnnnnnnnnnnnnnnnnnnnnnnnnnnnnnnnnnnnnnnnnnnnnnnnnnnnnnnnnnnnnnnnnnnnnnnnnnnnnnnnnnnnnnnnnnnnnnnnnnnnnnnnnnnnnnnnnnnnnnnnnnnnnnnnnnnnnnnnnnnnnnnnnnnnnnnnnnnnnnnnnnnnnnnnnnnnnnnnnnnnnnnnnnnnnnnnnnnnnnnnnnnnnnnnnnnnnnnnnnnnnnnnnnnnnnnnnnnnnnnnnnnnnnnnnnnnnnnnnnnnnnnnnnnnnnnnnnnnnnnnnnnnnnnnnnnnnnnnnnnnnnnnnnnnnnnnnnnnnnnnnnnnnnnnnnnnnnnnnnnnnnnnnnnnnnnnnnnnnnnnnnnnnnnnnnnnnnnnnnnnnnnnnnnnnnnnnnnnnnnnnnnnnnnnnnnnnnnnnnnnnnnnnnnnnnnnnnnnnnnnnnnnnnnnnnnnnnnnnnnnnnnnnnnnnnnnnnnnnnnnnnnnnnnnnnnnnnnnnnnnnnnnnnnnnnnnnnnnnnnnnnnnnnnnnnnnnnnnnnnnnnnnnnnnnnnnnnnnnnnnnnnnnnnnnnnnnnnnnnnnnnnnnnnnnnnnnnnnnnnnnnnnnnnnnnnnnnnnnnnnnnnnnnnnnnnnnnnnnnnnnnnnnnnnnnnnnnnnnnnnnnnnnnnnnnnnnnnnnnnnnnnnnnnnnnnnnnnnnnnnnnnnnnnnnnnnnnnnnnnnnnnnnnnnnnnnnnnnnnnnnnnnnnnnnnnnnnnnnnnnnnnnnnnnnnnnnnnnnnnnnnnnnnnnnnnnnnnnnnnnnnnnnnnnnnnnnnnnnnnnnnnnnnnnnnnnnnnnnnnnnnnnnnnnnnnnnnnnnnnnnnnnnnnnnnnnnnnnnnnnnnnnnnnnnnnnnnnnnnnnnnnnnnnnnnnnnnnnnnnnnnnnnnnnnnnnnnnnnnnnnnnnnnnnnnnnnnnnnnnnnnnnnnnnnnnnnnnnnnnnnnnnnnnnnnnnnnnnnnnnnnnnnnnnnnnnnnnnnnnnnnnnnnnnnnnnnnnnnnnnnnnnnnnnnnnnnnnnnnnnnnnnnnnnnnnnnnnnnnnnnnnnnnnnnnnnnnnnnnnnnnnnnnnnnnnnnnnnnnnnnnnnnnnnnnnnnnnnnnnnnnnnnnnnnnnnnnnnnnnnnnnnnnnnnnnnnnnnnnnnnnnnnnnnnnnnnnnnnnnnnnnnnnnnnnnnnnnnnnnnnnnnnnnnnnnnnnnnnnnnnnnnnnnnnnnnnnnnnnnnnnnnnnnnnnnnnnnnnnnnnnnnnnnnnnnnnnnnnnnnnnnnnnnnnnnnnnnnnnnnnnnnnnnnnnnnnnnnnnnnnnnnnnnnnnnnnnnnnnnnnnnnnnnnnnnnnnnnnnnnnnnnnnnnnnnnnnnnnnnnnnnnnnnnnnnnnnnnnnnnnnnnnnnnnnnnnnnnnnnnnnnnnnnnnnnnnnnnnnnnnnnnnnnnnnnnnnnnnnnnnnnnnnnnnnnnnnnnnnnnnnnnnnnnnnnnnnnnnnnnnnnnnnnnnnnnnnnnnnnnnnnnnnnnnnnnnnnnnnnnnnnnnnnnnnnnnnnnnnnnnnnnnnnnnnnnnnnnnnnnnnnnnnnnnnnnnnnnnnnnnnnnnnnnnnnnnnnnnnnnnnnnnnnnnnnnnnnnnnnnnnnnnnnnnnnnnnnnnnnnnnnnnnnnnnnnnnnnnnnnnnnnnnnnnnnnnnnnnnnnnnnnnnnnnnnnnnnnnnnnnnnnnnnnnnnnnnnnnnnnnnnnnnnnnnnnnnnnnnnnnnnnnnnnnnnnnnnnnnnnnnnnnnnnnnnnnnnnnnnnnnnnnnnnnnnnnnnnnnnnnnnnnnnnnnnnnnnnnnnnnnnnnnnnnnnnnnnnnnnnnnnnnnnnnnnnnnnnnnnnnnnnnnnnnnnnnnnnnnnnnnnnnnnnnnnnnnnnnnnnnnnnnnnnnnnnnnnnnnnnnnnnnnnnnnnnnnnnnnnnnnnnnnnnnnnnnnnnnnnnnnnnnnnnnnnnnnnnnnnnnnnnnnnnnnnnnnnnnnnnnnnnnnnnnnnnnnnnnnnnnnnnnnnnnnnnnnnnnnnnnnnnnnnnnnnnnnnnnnnnnnnnnnnnnnnnnnnnnnnnnnnnnnnnnnnnnnnnnnnnnnnnnnnnnnnnnnnnnnnnnnnnnnnnnnnnnnnnnnnnnnnnnnnnnnnnnnnnnnnnnnnnnnnnnnnnnnnnnnnnnnnnnnnnnnnnnnnnnnnnnnnnnnnnnnnnnnnnnnnnnnnnnnnnnnnnnnnnnnnnnnnnnnnnnnnnnnnnnnnnnnnnnnnnnnnnnnnnnnnnnnnnnnnnnnnnnnnnnnnnnnnnnnnnnnnnnnnnnnnnnnnnnnnnnnnnnnnnnnnnnnnnnnnnnnnnnnnnnnnnnnnnnnnnnnnnnnnnnnnnnnnnnnnnnnnnnnnnnnnnnnnnnnnnnnnnnnnnnnnnnnnnnnnnnnnnnnnnnnnnnnnnnnnnnnnnnnnnnnnnnnnnnnnnnnnnnnnnnnnnnnnnnnnnnnnnnnnnnnnnnnnnnnnnnnnnnnnnnnnnnnnnnnnnnnnnnnnnnnnnnnnnnnnnnnnnnnnnnnnnnnnnnnnnnnnnnnnnnnnnnnnnnnnnnnnnnnnnnnnnnnnnnnnnnnnnnnnnnnnnnnnnnnnnnnnnnnnnnnnnnnnnnnnnnnnnnnnnnnnnnnnnnnnnnnnnnnnnnnnnnnnnnnnnnnnnnnnnnnnnnnnnnnnnnnnnnnnnnnnnnnnnnnnnnnnnnnnnnnnnnnnnnnnnnnnnnnnnnnnnnnnnnnnnnnnnnnnnnnnnnnnnnnnnnnnnnnnnnnnnnnnnnnnnnnnnnnnnnnnnnnnnnnnnnnnnnnnnnnnnnnnnnnnnnnnnnnnnnnnnnnnnnnnnnnnnnnnnnnnnnnnnnnnnnnnnnnnnnnnnnnnnnnnnnnnnnnnnnnnnnnnnnnnnnnnnnnnnnnnnnnnnnnnnnnnnnnnnnnnnnnnnnnnnnnnnnnnnnnnnnnnnnnnnnnnnnnnnnnnnnnnnnnnnnnnnnnnnnnnnnnnnnnnnnnnnnnnnnnnnnnnnnnnnnnnnnnnnnnnnnnnnnnnnnnnnnnnnnnnnnnnnnnnnnnnnnnnnnnnnnnnnnnnnnnnnnnnnnnnnnnnnnnnnnnnnnnnnnnnnnnnnnnnnnnnnnnnnnnnnnnnnnnnnnnnnnnnnnnnnnnnnnnnnnnnnnnnnnnnnnnnnnnnnnnnnnnnnnnnnnnnnnnnnnnnnnnnnnnnnnnnnnnnnnnnnnnnnnnnnnnnnnnnnnnnnnnnnnnnnnnnnnnnnnnnnnnnnnnnnnnnnnnnnnnnnnnnnnnnnnnnnnnnnnnnnnnnnnnnnnnnnnnnnnnnnnnnnnnnnnnnnnnnnnnnnnnnnnnnnnnnnnnnnnnnnnnnnnnnnnnnnnnnnnnnnnnnnnnnnnnnnnnnnnnnnnnnnnnnnnnnnnnnnnnnnnnnnnnnnnnnnnnnnnnnnnnnnnnnnnnnnnnnnnnnnnnnnnnnnnnnnnnnnnnnnnnnnnnnnnnnnnnnnnnnnnnnnnnnnnnnnnnnnnnnnnnnnnnnnnnnnnnnnnnnnnnnnnnnnnnnnnnnnnnnnnnnnnnnnnnnnnnnnnnnnnnnnnnnnnnnnnnnnnnnnnnnnnnnnnnnnnnnnnnnnnnnnnnnnnnnnnnnnnnnnnnnnnnnnnnnnnnnnnnnnnnnnnnnnnnnnnnnnnnnnnnnnnnnnnnnnnnnnnnnnnnnnnnnnnnnnnnnnnnnnnnnnnnnnnnnnnnnnnnnnnnnnnnnnnnnnnnnnnnnnnnnnnnnnnnnnnnnnnnnnnnnnnnnnnnnnnnnnnnnnnnnnnnnnnnnnnnnnnnnnnnnnnnnnnnnnnnnnnnnnnnnnnnnnnnnnnnnnnnnnnnnnnnnnnnnnnnnnnnnnnnnnnnnnnnnnnnnnnnnnnnnnnnnnnnnnnnnnnnnnnnnnnnnnnnnnnnnnnnnnnnnnnnnnnnnnnnnnnnnnnnnnnnnnnnnnnnnnnnnnnnnnnnnnnnnnnnnnnnnnnnnnnnnnnnnnnnnnnnnnnnnnnnnnnnnnnnnnnnnnnnnnnnnnnnnnnnnnnnnnnnnnnnnnnnnnnnnnnnnnnnnnnnnnnnnnnnnnnnnnnnnnnnnnnnnnnnnnnnnnnnnnnnnnnnnnnnnnnnnnnnnnnnnnnnnnnnnnnnnnnnnnnnnnnnnnnnnnnnnnnnnnnnnnnnnnnnnnnnnnnnnnnnnnnnnnnnnnnnnnnnnnnnnnnnnnnnnnnnnnnnnnnnnnnnnnnnnnnnnnnnnnnnnnnnnnnnnnnnnnnnnnnnnnnnnnnnnnnnnnnnnnnnnnnnnnnnnnnnnnnnnnnnnnnnnnnnnnnnnnnnnnnnnnnnnnnnnnnnnnnnnnnnnnnnnnnnnnnnnnnnnnnnnnnnnnnnnnnnnnnnnnnnnnnnnnnnnnnnnnnnnnnnnnnnnnnnnnnnnnnnnnnnnnnnnnnnnnnnnnnnnnnnnnnnnnnnnnnnnnnnnnnnnnnnnnnnnnnnnnnnnnnnnnnnnnnnnnnnnnnnnnnnnnnnnnnnnnnnnnnnnnnnnnnnnnnnnnnnnnnnnnnnnnnnnnnnnnnnnnnnnnnnnnnnnnnnnnnnnnnnnnnnnnnnnnnnnnnnnnnnnnnnnnnnnnnnnnnnnnnnnnnnnnnnnnnnnnnnnnnnnnnnnnnnnnnnnnnnnnnnnnnnnnnnnnnnnnnnnnnnnnnnnnnnnnnnnnnnnnnnnnnnnnnnnnnnnnnnnnnnnnnnnnnnnnnnnnnnnnnnnnnnnnnnnnnnnnnnnnnnnnnnnnnnnnnnnnnnnnnnnnnnnnnnnnnnnnnnnnnnnnnnnnnnnnnnnnnnnnnnnnnnnnnnnnnnnnnnnnnnnnnnnnnnnnnnnnnnnnnnnnnnnnnnnnnnnnnnnnnnnnnnnnnnnnnnnnnnnnnnnnnnnnnnnnnnnnnnnnnnnnnnnnnnnnnnnnnnnnnnnnnnnnnnnnnnnnnnnnnnnnnnnnnnnnnnnnnnnnnnnnnnnnnnnnnnnnnnnnnnnnnnnnnnnnnnnnnnnnnnnnnnnnnnnnnnnnnnnnnnnnnnnnnnnnnnnnnnnnnnnnnnnnnnnnnnnnnnnnnnnnnnnnnnnnnnnnnnnnnnnnnnnnnnnnnnnnnnnnnnnnnnnnnnnnnnnnnnnnnnnnnnnnnnnnnnnnnnnnnnnnnnnnnnnnnnnnnnnnnnnnnnnnnnnnnnnnnnnnnnnnnnnnnnnnnnnnnnnnnnnnnnnnnnnnnnnnnnnnnnnnnnnnnnnnnnnnnnnnnnnnnnnnnnnnnnnnnnnnnnnnnnnnnnnnnnnnnnnnnnnnnnnnnnnnnnnnnnnnnnnnnnnnnnnnnnnnnnnnnnnnnnnnnnnnnnnnnnnnnnnnnnnnnnnnnnnnnnnnnnnnnnnnnnnnnnnnnnnnnnnnnnnnnnnnnnnnnnnnnnnnnnnnnnnnnnnnnnnnnnnnnnnnnnnnnnnnnnnnnnnnnnnnnnnnnnnnnnnnnnnnnnnnnnnnnnnnnnnnnnnnnnnnnnnnnnnnnnnnnnnnnnnnnnnnnnnnnnnnnnnnnnnnnnnnnnnnnnnnnnnnnnnnnnnnnnnnnnnnnnnnnnnnnnnnnnnnnnnnnnnnnnnnnnnnnnnnnnnnnnnnnnnnnnnnnnnnnnnnnnnnnnnnnnnnnnnnnnnnnnnnnnnnnnnnnnnnnnnnnnnnnnnnnnnnnnnnnnnnnnnnnnnnnnnnnnnnnnnnnnnnnnnnnnnnnnnnnnnnnnnnnnnnnnnnnnnnnnnnnnnnnnnnnnnnnnnnnnnnnnnnnnnnnnnnnnnnnnnnnnnnnnnnnnnnnnnnnnnnnnnnnnnnnnnnnnnnnnnnnnnnnnnnnnnnnnnnnnnnnnnnnnnnnnnnnnnnnnnnnnnnnnnnnnnnnnnnnnnnnnnnnnnnnnnnnnnnnnnnnnnnnnnnnnnnnnnnnnnnnnnnnnnnnnnnnnnnnnnnnnnnnnnnnnnnnnnnnnnnnnnnnnnnnnnnnnnnnnnnnnnnnnnnnnnnnnnnnnnnnnnnnnnnnnnnnnnnnnnnnnnnnnnnnnnnnnnnnnnnnnnnnnnnnnnnnnnnnnnnnnnnnnnnnnnnnnnnnnnnnnnnnnnnnnnnnnnnnnnnnnnnnnnnnnnnnnnnnnnnnnnnnnnnnnnnnnnnnnnnnnnnnnnnnnnnnnnnnnnnnnnnnnnnnnnnnnnnnnnnnnnnnnnnnnnnnnnnnnnnnnnnnnnnnnnnnnnnnnnnnnnnnnnnnnnnnnnnnnnnnnnnnnnnnnnnnnnnnnnnnnnnnnnnnnnnnnnnnnnnnnnnnnnnnnnnnnnnnnnnnnnnnnnnnnnnnnnnnnnnnnnnnnnnnnnnnnnnnnnnnnnnnnnnnnnnnnnnnnnnnnnnnnnnnnnnnnnnnnnnnnnnnnnnnnnnnnnnnnnnnnnnnnnnnnnnnnnnnnnnnnnnnnnnnnnnnnnnnnnnnnnnnnnnnnnnnnnnnnnnnnnnnnnnnnnnnnnnnnnnnnnnnnnnnnnnnnnnnnnnnnnnnnnnnnnnnnnnnnnnnnnnnnnnnnnnnnnnnnnnnnnnnnnnnnnnnnnnnnnnnnnnnnnnnnnnnnnnnnnnnnnnnnnnnnnnnnnnnnnnnnnnnnnnnnnnnnnnnnnnnnnnnnnnnnnnnnnnnnnnnnnnnnnnnnnnnnnnnnnnnnnnnnnnnnnnnnnnnnnnnnnnnnnnnnnnnnnnnnnnnnnnnnnnnnnnnnnnnnnnnnnnnnnnnnnnnnnnnnnnnnnnnnnnnnnnnnnnnnnnnnnnnnnnnnnnnnnnnnnnnnnnnnnnnnnnnnnnnnnnnnnnnnnnnnnnnnnnnnnnnnnnnnnnnnnnnnnnnnnnnnnnnnnnnnnnnnnnnnnnnnnnnnnnnnnnnnnnnnnnnnnnnnnnnnnnnnnnnnnnnnnnnnnnnnnnnnnnnnnnnnnnnnnnnnnnnnnnnnnnnnnnnnnnnnnnnnnnnnnnnnnnnnnnnnnnnnnnnnnnnnnnnnnnnnnnnnnnnnnnnnnnnnnnnnnnnnnnnnnnnnnnnnnnnnnnnnnnnnnnnnnnnnnnnnnnnnnnnnnnnnnnnnnnnnnnnnnnnnnnnnnnnnnnnnnnnnnnnnnnnnnnnnnnnnnnnnnnnnnnnnnnnnnnnnnnnnnnnnnnnnnnnnnnnnnnnnnnnnnnnnnnnnnnnnnnnnnnnnnnnnnnnnnnnnnnnnnnnnnnnnnnnnnnnnnnnnnnnnnnnnnnnnnnnnnnnnnnnnnnnnnnnnnnnnnnnnnnnnnnnnnnnnnnnnnnnnnnnnnnnnnnnnnnnnnnnnnnnnnnnnnnnnnnnnnnnnnnnnnnnnnnnnnnnnnnnnnnnnnnnnnnnnnnnnnnnnnnnnnnnnnnnnnnnnnnnnnnnnnnnnnnnnnnnnnnnnnnnnnnnnnnnnnnnnnnnnnnnnnnnnnnnnnnnnnnnnnnnnnnnnnnnnnnnnnnnnnnnnnnnnnnnnnnnnnnnnnnnnnnnnnnnnnnnnnnnnnnnnnnnnnnnnnnnnnnnnnnnnnnnnnnnnnnnnnnnnnnnnnnnnnnnnnnnnnnnnnnnnnnnnnnnnnnnnnnnnnnnnnnnnnnnnnnnnnnnnnnnnnnnnnnnnnnnnnnnnnnnnnnnnnnnnnnnnnnnnnnnnnnnnnnnnnnnnnnnnnnnnnnnnnnnnnnnnnnnnnnnnnnnnnnnnnnnnnnnnnnnnnnnnnnnnnnnnnnnnnnnnnnnnnnnnnnnnnnnnnnnnnnnnnnnnnnnnnnnnnnnnnnnnnnnnnnnnnnnnnnnnnnnnnnnnnnnnnnnnnnnnnnnnnnnnnnnnnnnnnnnnnnnnnnnnnnnnnnnnnnnnnnnnnnnnnnnnnnnnnnnnnnnnnnnnnnnnnnnnnnnnnnnnnnnnnnnnnnnnnnnnnnnnnnnnnnnnnnnnnnnnnnnnnnnnnnnnnnnnnnnnnnnnnnnnnnnnnnnnnnnnnnnnnnnnnnnnnnnnnnnnnnnnnnnnnnnnnnnnnnnnnnnnnnnnnnnnnnnnnnnnnnnnnnnnnnnnnnnnnnnnnnnnnnnnnnnnnnnnnnnnnnnnnnnnnnnnnnnnnnnnnnnnnnnnnnnnnnnnnnnnnnnnnnnnnnnnnnnnnnnnnnnnnnnnnnnnnnnnnnnnnnnnnnnnnnnnnnnnnnnnnnnnnnnnnnnnnnnnnnnnnnnnnnnnnnnnnnnnnnnnnnnnnnnnnnnnnnnnnnnnnnnnnnnnnnnnnnnnnnnnnnnnnnnnnnnnnnnnnnnnnnnnnnnnnnnnnnnnnnnnnnnnnnnnnnnnnnnnnnnnnnnnnnnnnnnnnnnnnnnnnnnnnnnnnnnnnnnnnnnnnnnnnnnnnnnnnnnnnnnnnnnnnnnnnnnnnnnnnnnnnnnnnnnnnnnnnnnnnnnnnnnnnnnnnnnnnnnnnnnnnnnnnnnnnnnnnnnnnnnnnnnnnnnnnnnnnnnnnnnnnnnnnnnnnnnnnnnnnnnnnnnnnnnnnnnnnnnnnnnnnnnnnnnnnnnnnnnnnnnnnnnnnnnnnnnnnnnnnnnnnnnnnnnnnnnnnnnnnnnnnnnnnnnnnnnnnnnnnnnnnnnnnnnnnnnnnnnnnnnnnnnnnnnnnnnnnnnnnnnnnnnnnnnnnnnnnnnnnnnnnnnnnnnnnnnnnnnnnnnnnnnnnnnnnnnnnnnnnnnnnnnnnnnnnnnnnnnnnnnnnnnnnnnnnnnnnnnnnnnnnnnnnnnnnnnnnnnnnnnnnnnnnnnnnnnnnnnnnnnnnnnnnnnnnnnnnnnnnnnnnnnnnnnnnnnnnnnnnnnnnnnnnnnnnnnnnnnnnnnnnnnnnnnnnnnnnnnnnnnnnnnnnnnnnnnnnnnnnnnnnnnnnnnnnnnnnnnnnnnnnnnnnnnnnnnnnnnnnnnnnnnnnnnnnnnnnnnnnnnnnnnnnnnnnnnnnnnnnnnnnnnnnnnnnnnnnnnnnnnnnnnnnnnnnnnnnnnnnnnnnnnnnnnnnnnnnnnnnnnnnnnnnnnnnnnnnnnnnnnnnnnnnnnnnnnnnnnnnnnnnnnnnnnnnnnnnnnnnnnnnnnnnnnnnnnnnnnnnnnnnnnnnnnnnnnnnnnnnnnnnnnnnnnnnnnnnnnnnnnnnnnnnnnnnnnnnnnnnnnnnnnnnnnnnnnnnnnnnnnnnnnnnnnnnnnnnnnnnnnnnnnnnnnnnnnnnnnnnnnnnnnnnnnnnnnnnnnnnnnnnnnnnnnnnnnnnnnnnnnnnnnnnnnnnnnnnnnnnnnnnnnnnnnnnnnnnnnnnnnnnnnnnnnnnnnnnnnnnnnnnnnnnnnnnnnnnnnnnnnnnnnnnnnnnnnnnnnnnnnnnnnnnnnnnnnnnnnnnnnnnnnnnnnnnnnnnnnnnnnnnnnnnnnnnnnnnnnnnnnnnnnnnnnnnnnnnnnnnnnnnnnnnnnnnnnnnnnnnnnnnnnnnnnnnnnnnnnnnnnnnnnnnnnnnnnnnnnnnnnnnnnnnnnnnnnnnnnnnnnnnnnnnnnnnnnnnnnnnnnnnnnnnnnnnnnnnnnnnnnnnnnnnnnnnnnnnnnnnnnnnnnnnnnnnnnnnnnnnnnnnnnnnnnnnnnnnnnnnnnnnnnnnnnnnnnnnnnnnnnnnnnnnnnnnnnnnnnnnnnnnnnnnnnnnnnnnnnnnnnnnnnnnnnnnnnnnnnnnnnnnnnnnnnnnnnnnnnnnnnnnnnnnnnnnnnnnnnnnnnnnnnnnnnnnnnnnnnnnnnnnnnnnnnnnnnnnnnnnnnnnnnnnnnnnnnnnnnnnnnnnnnnnnnnnnnnnnnnnnnnnnnnnnnnnnnnnnnnnnnnnnnnnnnnnnnnnnnnnnnnnnnnnnnnnnnnnnnnnnnnnnnnnnnnnnnnnnnnnnnnnnnnnnnnnnnnnnnnnnnnnnnnnnnnnnnnnnnnnnnnnnnnnnnnnnnnnnnnnnnnnnnnnnnnnnnnnnnnnnnnnnnnnnnnnnnnnnnnnnnnnnnnnnnnnnnnnnnnnnnnnnnnnnnnnnnnnnnnnnnnnnnnnnnnnnnnnnnnnnnnnnnnnnnnnnnnnnnnnnnnnnnnnnnnnnnnnnnnnnnnnnnnnnnnnnnnnnnnnnnnnnnnnnnnnnnnnnnnnnnnnnnnnnnnnnnnnnnnnnnnnnnnnnnnnnnnnnnnnnnnnnnnnnnnnnnnnnnnnnnnnnnnnnnnnnnnnnnnnnnnnnnnnnnnnnnnnnnnnnnnnnnnnnnnnnnnnnnnnnnnnnnnnnnnnnnnnnnnnnnnnnnnnnnnnnnnnnnnnnnnnnnnnnnnnnnnnnnnnnnnnnnnnnnnnnnnnnnnnnnnnnnnnnnnnnnnnnnnnnnnnnnnnnnnnnnnnnnnnnnnnnnnnnnnnnnnnnnnnnnnnnnnnnnnnnnnnnnnnnnnnnnnnnnnnnnnnnnnnnnnnnnnnnnnnnnnnnnnnnnnnnnnnnnnnnnnnnnnnnnnnnnnnnnnnnnnnnnnnnnnnnnnnnnnnnnnnnnnnnnnnnnnnnnnnnnnnnnnnnnnnnnnnnnnnnnnnnnnnnnnnnnnnnnnnnnnnnnnnnnnnnnnnnnnnnnnnnnnnnnnnnnnnnnnnnnnnnnnnnnnnnnnnnnnnnnnnnnnnnnnnnnnnnnnnnnnnnnnnnnnnnnnnnnnnnnnnnnnnnnnnnnnnnnnnnnnnnnnnnnnnnnnnnnnnnnnnnnnnnnnnnnnnnnnnnnnnnnnnnnnnnnnnnnnnnnnnnnnnnnnnnnnnnnnnnnnnnnnnnnnnnnnnnnnnnnnnnnnnnnnnnnnnnnnnnnnnnnnnnnnnnnnnnnnnnnnnnnnnnnnnnnnnnnnnnnnnnnnnnnnnnnnnnnnnnnnnnnnnnnnnnnnnnnnnnnnnnnnnnnnnnnnnnnnnnnnnnnnnnnnnnnnnnnnnnnnnnnnnnnnnnnnnnnnnnnnnnnnnnnnnnnnnnnnnnnnnnnnnnnnnnnnnnnnnnnnnnnnnnnnnnnnnnnnnnnnnnnnnnnnnnnnnnnnnnnnnnnnnnnnnnnnnnnnnnnnnnnnnnnnnnnnnnnnnnnnnnnnnnnnnnnnnnnnnnnnnnnnnnnnnnnnnnnnnnnnnnnnnnnnnnnnnnnnnnnnnnnnnnnnnnnnnnnnnnnnnnnnnnnnnnnnnnnnnnnnnnnnnnnnnnnnnnnnnnnnnnnnnnnnnnnnnnnnnnnnnnnnnnnnnnnnnnnnnnnnnnnnnnnnnnnnnnnnnnnnnnnnnnnnnnnnnnnnnnnnnnnnnnnnnnnnnnnnnnnnnnnnnnnnnnnnnnnnnnnnnnnnnnnnnnnnnnnnnnnnnnnnnnnnnnnnnnnnnnnnnnnnnnnnnnnnnnnnnnnnnnnnnnnnnnnnnnnnnnnnnnnnnnnnnnnnnnnnnnnnnnnnnnnnnnnnnnnnnnnnnnnnnnnnnnnnnnnnnnnnnnnnnnnnnnnnnnnnnnnnnnnnnnnnnnnnnnnnnnnnnnnnnnnnnnnnnnnnnnnnnnnnnnnnnnnnnnnnnnnnnnnnnnnnnnnnnnnnnnnnnnnnnnnnnnnnnnnnnnnnnnnnnnnnnnnnnnnnnnnnnnnnnnnnnnnnnnnnnnnnnnnnnnnnnnnnnnnnnnnnnnnnnnnnnnnnnnnnnnnnnnnnnnnnnnnnnnnnnnnnnnnnnnnnnnnnnnnnnnnnnnnnnnnnnnnnnnnnnnnnnnnnnnnnnnnnnnnnnnnnnnnnnnnnnnnnnnnnnnnnnnnnnnnnnnnnnnnnnnnnnnnnnnnnnnnnnnnnnnnnnnnnnnnnnnnnnnnnnnnnnnnnnnnnnnnnnnnnnnnnnnnnnnnnnnnnnnnnnnnnnnnnnnnnnnnnnnnnnnnnnnnnnnnnnnnnnnnnnnnnnnnnnnnnnnnnnnnnnnnnnnnnnnnnnnnnnnnnnnnnnnnnnnnnnnnnnnnnnnnnnnnnnnnnnnnnnnnnnnnnnnnnnnnnnnnnnnnnnnnnnnnnnnnnnnnnnnnnnnnnnnnnnnnnnnnnnnnnnnnnnnnnnnnnnnnnnnnnnnnnnnnnnnnnnnnnnnnnnnnnnnnnnnnnnnnnnnnnnnnnnnnnnnnnnnnnnnnnnnnnnnnnnnnnnnnnnnnnnnnnnnnnnnnnnnnnnnnnnnnnnnnnnnnnnnnnnnnnnnnnnnnnnnnnnnnnnnnnnnnnnnnnnnnnnnnnnnnnnnnnnnnnnnnnnnnnnnnnnnnnnnnnnnnnnnnnnnnnnnnnnnnnnnnnnnnnnnnnnnnnnnnnnnnnnnnnnnnnnnnnnnnnnnnnnnnnnnnnnnnnnnnnnnnnnnnnnnnnnnnnnnnnnnnnnnnnnnnnnnnnnnnnnnnnnnnnnnnnnnnnnnnnnnnnnnnnnnnnnnnnnnnnnnnnnnnnnnnnnnnnnnnnnnnnnnnnnnnnnnnnnnnnnnnnnnnnnnnnnnnnnnnnnnnnnnnnnnnnnnnnnnnnnnnnnnnnnnnnnnnnnnnnnnnnnnnnnnnnnnnnnnnnnnnnnnnnnnnnnnnnnnnnnnnnnnnnnnnnnnnnnnnnnnnnnnnnnnnnnnnnnnnnnnnnnnnnnnnnnnnnnnnnnnnnnnnnnnnnnnnnnnnnnnnnnnnnnnnnnnnnnnnnnnnnnnnnnnnnnnnnnnnnnnnnnnnnnnnnnnnnnnnnnnnnnnnnnnnnnnnnnnnnnnnnnnnnnnnnnnnnnnnnnnnnnnnnnnnnnnnnnnnnnnnnnnnnnnnnnnnnnnnnnnnnnnnnnnnnnnnnnnnnnnnnnnnnnnnnnnnnnnnnnnnnnnnnnnnnnnnnnnnnnnnnnnnnnnnnnnnnnnnnnnnnnnnnnnnnnnnnnnnnnnnnnnnnnnnnnnnnnnnnnnnnnnnnnnnnnnnnnnnnnnnnnnnnnnnnnnnnnnnnnnnnnnnnnnnnnnnnnnnnnnnnnnnnnnnnnnnnnnnnnnnnnnnnnnnnnnnnnnnnnnnnnnnnnnnnnnnnnnnnnnnnnnnnnnnnnnnnnnnnnnnnnnnnnnnnnnnnnnnnnnnnnnnnnnnnnnnnnnnnnnnnnnnnnnnnnnnnnnnnnnnnnnnnnnnnnnnnnnnnnnnnnnnnnnnnnnnnnnnnnnnnnnnnnnnnnnnnnnnnnnnnnnnnnnnnnnnnnnnnnnnnnnnnnnnnnnnnnnnnnnnnnnnnnnnnnnnnnnnnnnnnnnnnnnnnnnnnnnnnnnnnnnnnnnnnnnnnnnnnnnnnnnnnnnnnnnnnnnnnnnnnnnnnnnnnnnnnnnnnnnnnnnnnnnnnnnnnnnnnnnnnnnnnnnnnnnnnnnnnnnnnnnnnnnnnnnnnnnnnnnnnnnnnnnnnnnnnnnnnnnnnnnnnnnnnnnnnnnnnnnnnnnnnnnnnnnnnnnnnnnnnnnnnnnnnnnnnnnnnnnnnnnnnnnnnnnnnnnnnnnnnnnnnnnnnnnnnnnnnnnnnnnnnnnnnnnnnnnnnnnnnnnnnnnnnnnnnnnnnnnnnnnnnnnnnnnnnnnnnnnnnnnnnnnnnnnnnnnnnnnnnnnnnnnnnnnnnnnnnnnnnnnnnnnnnnnnnnnnnnnnnnnnnnnnnnnnnnnnnnnnnnnnnnnnnnnnnnnnnnnnnnnnnnnnnnnnnnnnnnnnnnnnnnnnnnnnnnnnnnnnnnnnnnnnnnnnnnnnnnnnnnnnnnnnnnnnnnnnnnnnnnnnnnnnnnnnnnnnnnnnnnnnnnnnnnnnnnnnnnnnnnnnnnnnnnnnnnnnnnnnnnnnnnnnnnnnnnnnnnnnnnnnnnnnnnnnnnnnnnnnnnnnnnnnnnnnnnnnnnnnnnnnnnnnnnnnnnnnnnnnnnnnnnnnnnnnnnnnnnnnnnnnnnnnnnnnnnnnnnnnnnnnnnnnnnnnnnnnnnnnnnnnnnnnnnnnnnnnnnnnnnnnnnnnnnnnnnnnnnnnnnnnnnnnnnnnnnnnnnnnnnnnnnnnnnnnnnnnnnnnnnnnnnnnnnnnnnnnnnnnnnnnnnnnnnnnnnnnnnnnnnnnnnnnnnnnnnnnnnnnnnnnnnnnnnnnnnnnnnnnnnnnnnnnnnnnnnnnnnnnnnnnnnnnnnnnnnnnnnnnnnnnnnnnnnnnnnnnnnnnnnnnnnnnnnnnnnnnnnnnnnnnnnnnnnnnnnnnnnnnnnnnnnnnnnnnnnnnnnnnnnnnnnnnnnnnnnnnnnnnnnnnnnnnnnnnnnnnnnnnnnnnnnnnnnnnnnnnnnnnnnnnnnnnnnnnnnnnnnnnnnnnnnnnnnnnnnnnnnnnnnnnnnnnnnnnnnnnnnnnnnnnnnnnnnnnnnnnnnnnnnnnnnnnnnnnnnnnnnnnnnnnnnnnnnnnnnnnnnnnnnnnnnnnnnnnnnnnnnnnnnnnnnnnnnnnnnnnnnnnnnnnnnnnnnnnnnnnnnnnnnnnnnnnnnnnnnnnnnnnnnnnnnnnnnnnnnnnnnnnnnnnnnnnnnnnnnnnnnnnnnnnnnnnnnnnnnnnnnnnnnnnnnnnnnnnnnnnnnnnnnnnnnnnnnnnnnnnnnnnnnnnnnnnnnnnnnnnnnnnnnnnnnnnnnnnnnnnnnnnnnnnnnnnnnnnnnnnnnnnnnnnnnnnnnnnnnnnnnnnnnnnnnnnnnnnnnnnnnnnnnnnnnnnnnnnnnnnnnnnnnnnnnnnnnnnnnnnnnnnnnnnnnnnnnnnnnnnnnnnnnnnnnnnnnnnnnnnnnnnnnnnnnnnnnnnnnnnnnnnnnnnnnnnnnnnnnnnnnnnnnnnnnnnnnnnnnnnnnnnnnnnnnnnnnnnnnnnnnnnnnnnnnnnnnnnnnnnnnnnnnnnnnnnnnnnnnnnnnnnnnnnnnnnnnnnnnnnnnnnnnnnnnnnnnnnnnnnnnnnnnnnnnnnnnnnnnnnnnnnnnnnnnnnnnnnnnnnnnnnnnnnnnnnnnnnnnnnnnnnnnnnnnnnnnnnnnnnnnnnnnnnnnnnnnnnnnnnnnnnnnnnnnnnnnnnnnnnnnnnnnnnnnnnnnnnnnnnnnnnnnnnnnnnnnnnnnnnnnnnnnnnnnnnnnnnnnnnnnnnnnnnnnnnnnnnnnnnnnnnnnnnnnnnnnnnnnnnnnnnnnnnnnnnnnnnnnnnnnnnnnnnnnnnnnnnnnnnnnnnnnnnnnnnnnnnnnnnnnnnnnnnnnnnnnnnnnnnnnnnnnnnnnnnnnnnnnnnnnnnnnnnnnnnnnnnnnnnnnnnnnnnnnnnnnnnnnnnnnnnnnnnnnnnnnnnnnnnnnnnnnnnnnnnnnnnnnnnnnnnnnnnnnnnnnnnnnnnnnnnnnnnnnnnnnnnnnnnnnnnnnnnnnnnnnnnnnnnnnnnnnnnnnnnnnnnnnnnnnnnnnnnnnnnnnnnnnnnnnnnnnnnnnnnnnnnnnnnnnnnnnnnnnnnnnnnnnnnnnnnnnnnnnnnnnnnnnnnnnnnnnnnnnnnnnnnnnnnnnnnnnnnnnnnnnnnnnnnnnnnnnnnnnnnnnnnnnnnnnnnnnnnnnnnnnnnnnnnnnnnnnnnnnnnnnnnnnnnnnnnnnnnnnnnnnnnnnnnnnnnnnnnnnnnnnnnnnnnnnnnnnnnnnnnnnnnnnnnnnnnnnnnnnnnnnnnnnnnnnnnnnnnnnnnnnnnnnnnnnnnnnnnnnnnnnnnnnnnnnnnnnnnnnnnnnnnnnnnnnnnnnnnnnnnnnnnnnnnnnnnnnnnnnnnnnnnnnnnnnnnnnnnnnnnnnnnnnnnnnnnnnnnnnnnnnnnnnnnnnnnnnnnnnnnnnnnnnnnnnnnnnnnnnnnnnnnnnnnnnnnnnnnnnnnnnnnnnnnnnnnnnnnnnnnnnnnnnnnnnnnnnnnnnnnnnnnnnnnnnnnnnnnnnnnnnnnnnnnnnnnnnnnnnnnnnnnnnnnnnnnnnnnnnnnnnnnnnnnnnnnnnnnnnnnnnnnnnnnnnnnnnnnnnnnnnnnnnnnnnnnnnnnnnnnnnnnnnnnnnnnnnnnnnnnnnnnnnnnnnnnnnnnnnnnnnnnnnnnnnnnnnnnnnnnnnnnnnnnnnnnnnnnnnnnnnnnnnnnnnnnnnnnnnnnnnnnnnnnnnnnnnnnnnnnnnnnnnnnnnnnnnnnnnnnnnnnnnnnnnnnnnnnnnnnnnnnnnnnnnnnnnnnnnnnnnnnnnnnnnnnnnnnnnnnnnnnnnnnnnnnnnnnnnnnnnnnnnnnnnnnnnnnnnnnnnnnnnnnnnnnnnnnnnnnnnnnnnnnnnnnnnnnnnnnnnnnnnnnnnnnnnnnnnnnnnnnnnnnnnnnnnnnnnnnnnnnnnnnnnnnnnnnnnnnnnnnnnnnnnnnnnnnnnnnnnnnnnnnnnnnnnnnnnnnnnnnnnnnnnnnnnnnnnnnnnnnnnnnnnnnnnnnnnnnnnnnnnnnnnnnnnnnnnnnnnnnnnnnnnnnnnnnnnnnnnnnnnnnnnnnnnnnnnnnnnnnnnnnnnnnnnnnnnnnnnnnnnnnnnnnnnnnnnnnnnnnnnnnnnnnnnnnnnnnnnnnnnnnnnnnnnnnnnnnnnnnnnnnnnnnnnnnnnnnnnnnnnnnnnnnnnnnnnnnnnnnnnnnnnnnnnnnnnnnnnnnnnnnnnnnnnnnnnnnnnnnnnnnnnnnnnnnnnnnnnnnnnnnnnnnnnnnnnnnnnnnnnnnnnnnnnnnnnnnnnnnnnnnnnnnnnnnnnnnnnnnnnnnnnnnnnnnnnnnnnnnnnnnnnnnnnnnnnnnnnnnnnnnnnnnnnnnnnnnnnnnnnnnnnnnnnnnnnnnnnnnnnnnnnnnnnnnnnnnnnnnnnnnnnnnnnnnnnnnnnnnnnnnnnnnnnnnnnnnnnnnnnnnnnnnnnnnnnnnnnnnnnnnnnnnnnnnnnnnnnnnnnnnnnnnnnnnnnnnnnnnnnnnnnnnnnnnnnnnnnnnnnnnnnnnnnnnnnnnnnnnnnnnnnnnnnnnnnnnnnnnnnnnnnnnnnnnnnnnnnnnnnnnnnnnnnnnnnnnnnnnnnnnnnnnnnnnnnnnnnnnnnnnnnnnnnnnnnnnnnnnnnnnnnnnnnnnnnnnnnnnnnnnnnnnnnnnnnnnnnnnnnnnnnnnnnnnnnnnnnnnnnnnnnnnnnnnnnnnnnnnnnnnnnnnnnnnnnnnnnnnnnnnnnnnnnnnnnnnnnnnnnnnnnnnnnnnnnnnnnnnnnnnnnnnnnnnnnnnnnnnnnnnnnnnnnnnnnnnnnnnnnnnnnnnnnnnnnnnnnnnnnnnnnnnnnnnnnnnnnnnnnnnnnnnnnnnnnnnnnnnnnnnnnnnnnnnnnnnnnnnnnnnnnnnnnnnnnnnnnnnnnnnnnnnnnnnnnnnnnnnnnnnnnnnnnnnnnnnnnnnnnnnnnnnnnnnnnnnnnnnnnnnnnnnnnnnnnnnnnnnnnnnnnnnnnnnnnnnnnnnnnnnnnnnnnnnnnnnnnnnnnnnnnnnnnnnnnnnnnnnnnnnnnnnnnnnnnnnnnnnnnnnnnnnnnnnnnnnnnnnnnnnnnnnnnnnnnnnnnnnnnnnnnnnnnnnnnnnnnnnnnnnnnnnnnnnnnnnnnnnnnnnnnnnnnnnnnnnnnnnnnnnnnnnnnnnnnnnnnnnnnnnnnnnnnnnnnnnnnnnnnnnnnnnnnnnnnnnnnnnnnnnnnnnnnnnnnnnnnnnnnnnnnnnnnnnnnnnnnnnnnnnnnnnnnnnnnnnnnnnnnnnnnnnnnnnnnnnnnnnnnnnnnnnnnnnnnnnnnnnnnnnnnnnnnnnnnnnnnnnnnnnnnnnnnnnnnnnnnnnnnnnnnnnnnnnnnnnnnnnnnnnnnnnnnnnnnnnnnnnnnnnnnnnnnnnnnnnnnnnnnnnnnnnnnnnnnnnnnnnnnnnnnnnnnnnnnnnnnnnnnnnnnnnnnnnnnnnnnnnnnnnnnnnnnnnnnnnnnnnnnnnnnnnnnnnnnnnnnnnnnnnnnnnnnnnnnnnnnnnnnnnnnnnnnnnnnnnnnnnnnnnnnnnnnnnnnnnnnnnnnnnnnnnnnnnnnnnnnnnnnnnnnnnnnnnnnnnnnnnnnnnnnnnnnnnnnnnnnnnnnnnnnnnnnnnnnnnnnnnnnnnnnnnnnnnnnnnnnnnnnnnnnnnnnnnnnnnnnnnnnnnnnnnnnnnnnnnnnnnnnnnnnnnnnnnnnnnnnnnnnnnnnnnnnnnnnnnnnnnnnnnnnnnnnnnnnnnnnnnnnnnnnnnnnnnnnnnnnnnnnnnnnnnnnnnnnnnnnnnnnnnnnnnnnnnnnnnnnnnnnnnnnnnnnnnnnnnnnnnnnnnnnnnnnnnnnnnnnnnnnnnnnnnnnnnnnnnnnnnnnnnnnnnnnnnnnnnnnnnnnnnnnnnnnnnnnnnnnnnnnnnnnnnnnnnnnnnnnnnnnnnnnnnnnnnnnnnnnnnnnnnnnnnnnnnnnnnnnnnnnnnnnnnnnnnnnnnnnnnnnnnnnnnnnnnnnnnnnnnnnnnnnnnnnnnnnnnnnnnnnnnnnnnnnnnnnnnnnnnnnnnnnnnnnnnnnnnnnnnnnnnnnnnnnnnnnnnnnnnnnnnnnnnnnnnnnnnnnnnnnnnnnnnnnnnnnnnnnnnnnnnnnnnnnnnnnnnnnnnnnnnnnnnnnnnnnnnnnnnnnnnnnnnnnnnnnnnnnnnnnnnnnnnnnnnnnnnnnnnnnnnnnnnnnnnnnnnnnnnnnnnnnnnnnnnnnnnnnnnnnnnnnnnnnnnnnnnnnnnnnnnnnnnnnnnnnnnnnnnnnnnnnnnnnnnnnnnnnnnnnnnnnnnnnnnnnnnnnnnnnnnnnnnnnnnnnnnnnnnnnnnnnnnnnnnnnnnnnnnnnnnnnnnnnnnnnnnnnnnnnnnnnnnnnnnnnnnnnnnnnnnnnnnnnnnnnnnnnnnnnnnnnnnnnnnnnnnnnnnnnnnnnnnnnnnnnnnnnnnnnnnnnnnnnnnnnnnnnnnnnnnnnnnnnnnnnnnnnnnnnnnnnnnnnnnnnnnnnnnnnnnnnnnnnnnnnnnnnnnnnnnnnnnnnnnnnnnnnnnnnnnnnnnnnnnnnnnnnnnnnnnnnnnnnnnnnnnnnnnnnnnnnnnnnnnnnnnnnnnnnnnnnnnnnnnnnnnnnnnnnnnnnnnnnnnnnnnnnnnnnnnnnnnnnnnnnnnnnnnnnnnnnnnnnnnnnnnnnnnnnnnnnnnnnnnnnnnnnnnnnnnnnnnnnnnnnnnnnnnnnnnnnnnnnnnnnnnnnnnnnnnnnnnnnnnnnnnnnnnnnnnnnnnnnnnnnnnnnnnnnnnnnnnnnnnnnnnnnnnnnnnnnnnnnnnnnnnnnnnnnnnnnnnnnnnnnnnnnnnnnnnnnnnnnnnnnnnnnnnnnnnnnnnnnnnnnnnnnnnnnnnnnnnnnnnnnnnnnnnnnnnnnnnnnnnnnnnnnnnnnnnnnnnnnnnnnnnnnnnnnnnnnnnnnnnnnnnnnnnnnnnnnnnnnnnnnnnnnnnnnnnnnnnnnnnnnnnnnnnnnnnnnnnnnnnnnnnnnnnnnnnnnnnnnnnnnnnnnnnnnnnnnnnnnnnnnnnnnnnnnnnnnnnnnnnnnnnnnnnnnnnnnnnnnnnnnnnnnnnnnnnnnnnnnnnnnnnnnnnnnnnnnnnnnnnnnnnnnnnnnnnnnnnnnnnnnnnnnnnnnnnnnnnnnnnnnnnnnnnnnnnnnnnnnnnnnnnnnnnnnnnnnnnnnnnnnnnnnnnnnnnnnnnnnnnnnnnnnnnnnnnnnnnnnnnnnnnnnnnnnnnnnnnnnnnnnnnnnnnnnnnnnnnnnnnnnnnnnnnnnnnnnnnnnnnnnnnnnnnnnnnnnnnnnnnnnnnnnnnnnnnnnnnnnnnnnnnnnnnnnnnnnnnnnnnnnnnnnnnnnnnnnnnnnnnnnnnnnnnnnnnnnnnnnnnnnnnnnnnnnnnnnnnnnnnnnnnnnnnnnnnnnnnnnnnnnnnnnnnnnnnnnnnnnnnnnnnnnnnnnnnnnnnnnnnnnnnnnnnnnnnnnnnnnnnnnnnnnnnnnnnnnnnnnnnnnnnnnnnnnnnnnnnnnnnnnnnnnnnnnnnnnnnnnnnnnnnnnnnnnnnnnnnnnnnnnnnnnnnnnnnnnnnnnnnnnnnnnnnnnnnnnnnnnnnnnnnnnnnnnnnnnnnnnnnnnnnnnnnnnnnnnnnnnnnnnnnnnnnnnnnnnnnnnnnnnnnnnnnnnnnnnnnnnnnnnnnnnnnnnnnnnnnnnnnnnnnnnnnnnnnnnnnnnnnnnnnnnnnnnnnnnnnnnnnnnnnnnnnnnnnnnnnnnnnnnnnnnnnnnnnnnnnnnnnnnnnnnnnnnnnnnnnnnnnnnnnnnnnnnnnnnnnnnnnnnnnnnnnnnnnnnnnnnnnnnnnnnnnnnnnnnnnnnnnnnnnnnnnnnnnnnnnnnnnnnnnnnnnnnnnnnnnnnnnnnnnnnnnnnnnnnnnnnnnnnnnnnnnnnnnnnnnnnnnnnnnnnnnnnnnnnnnnnnnnnnnnnnnnnnnnnnnnnnnnnnnnnnnnnnnnnnnnnnnnnnnnnnnnnnnnnnnnnnnnnnnnnnnnnnnnnnnnnnnnnnnnnnnnnnnnnnnnnnnnnnnnnnnnnnnnnnnnnnnnnnnnnnnnnnnnnnnnnnnnnnnnnnnnnnnnnnnnnnnnnnnnnnnnnnnnnnnnnnnnnnnnnnnnnnnnnnnnnnnnnnnnnnnnnnnnnnnnnnnnnnnnnnnnnnnnnnnnnnnnnnnnnnnnnnnnnnnnnnnnnnnnnnnnnnnnnnnnnnnnnnnnnnnnnnnnnnnnnnnnnnnnnnnnnnnnnnnnnnnnnnnnnnnnnnnnnnnnnnnnnnnnnnnnnnnnnnnnnnnnnnnnnnnnnnnnnnnnnnnnnnnnnnnnnnnnnnnnnnnnnnnnnnnnnnnnnnnnnnnnnnnnnnnnnnnnnnnnnnnnnnnnnnnnnnnnnnnnnnnnnnnnnnnnnnnnnnnnnnnnnnnnnnnnnnnnnnnnnnnnnnnnnnnnnnnnnnnnnnnnnnnnnnnnnnnnnnnnnnnnnnnnnnnnnnnnnnnnnnnnnnnnnnnnnnnnnnnnnnnnnnnnnnnnnnnnnnnnnnnnnnnnnnnnnnnnnnnnnnnnnnnnnnnnnnnnnnnnnnnnnnnnnnnnnnnnnnnnnnnnnnnnnnnnnnnnnnnnnnnnnnnnnnnnnnnnnnnnnnnnnnnnnnnnnnnnnnnnnnnnnnnnnnnnnnnnnnnnnnnnnnnnnnnnnnnnnnnnnnnnnnnnnnnnnnnnnnnnnnnnnnnnnnnnnnnnnnnnnnnnnnnnnnnnnnnnnnnnnnnnnnnnnnnnnnnnnnnnnnnnnnnnnnnnnnnnnnnnnnnnnnnnnnnnnnnnnnnnnnnnnnnnnnnnnnnnnnnnnnnnnnnnnnnnnnnnnnnnnnnnnnnnnnnnnnnnnnnnnnnnnnnnnnnnnnnnnnnnnnnnnnnnnnnnnnnnnnnnnnnnnnnnnnnnnnnnnnnnnnnnnnnnnnnnnnnnnnnnnnnnnnnnnnnnnnnnnnnnnnnnnnnnnnnnnnnnnnnnnnnnnnnnnnnnnnnnnnnnnnnnnnnnnnnnnnnnnnnnnnnnnnnnnnnnnnnnnnnnnnnnnnnnnnnnnnnnnnnnnnnnnnnnnnnnnnnnnnnnnnnnnnnnnnnnnnnnnnnnnnnnnnnnnnnnnnnnnnnnnnnnnnnnnnnnnnnnnnnnnnnnnnnnnnnnnnnnnnnnnnnnnnnnnnnnnnnnnnnnnnnnnnnnnnnnnnnnnnnnnnnnnnnnnnnnnnnnnnnnnnnnnnnnnnnnnnnnnnnnnnnnnnnnnnnnnnnnnnnnnnnnnnnnnnnnnnnnnnnnnnnnnnnnnnnnnnnnnnnnnnnnnnnnnnnnnnnnnnnnnnnnnnnnnnnnnnnnnnnnnnnnnnnnnnnnnnnnnnnnnnnnnnnnnnnnnnnnnnnnnnnnnnnnnnnnnnnnnnnnnnnnnnnnnnnnnnnnnnnnnnnnnnnnnnnnnnnnnnnnnnnnnnnnnnnnnnnnnnnnnnnnnnnnnnnnnnnnnnnnnnnnnnnnnnnnnnnnnnnnnnnnnnnnnnnnnnnnnnnnnnnnnnnnnnnnnnnnnnnnnnnnnnnnnnnnnnnnnnnnnnnnnnnnnnnnnnnnnnnnnnnnnnnnnnnnnnnnnnnnnnnnnnnnnnnnnnnnnnnnnnnnnnnnnnnnnnnnnnnnnnnnnnnnnnnnnnnnnnnnnnnnnnnnnnnnnnnnnnnnnnnnnnnnnnnnnnnnnnnnnnnnnnnnnnnnnnnnnnnnnnnnnnnnnnnnnnnnnnnnnnnnnnnnnnnnnnnnnnnnnnnnnnnnnnnnnnnnnnnnnnnnnnnnnnnnnnnnnnnnnnnnnnnnnnnnnnnnnnnnnnnnnnnnnnnnnnnnnnnnnnnnnnnnnnnnnnnnnnnnnnnnnnnnnnnnnnnnnnnnnnnnnnnnnnnnnnnnnnnnnnnnnnnnnnnnnnnnnnnnnnnnnnnnnnnnnnnnnnnnnnnnnnnnnnnnnnnnnnnnnnnnnnnnnnnnnnnnnnnnnnnnnnnnnnnnnnnnnnnnnnnnnnnnnnnnnnnnnnnnnnnnnnnnnnnnnnnnnnnnnnnnnnnnnnnnnnnnnnnnnnnnnnnnnnnnnnnnnnnnnnnnnnnnnnnnnnnnnnnnnnnnnnnnnnnnnnnnnnnnnnnnnnnnnnnnnnnnnnnnnnnnnnnnnnnnnnnnnnnnnnnnnnnnnnnnnnnnnnnnnnnnnnnnnnnnnnnnnnnnnnnnnnnnnnnnnnnnnnnnnnnnnnnnnnnnnnnnnnnnnnnnnnnnnnnnnnnnnnnnnnnnnnnnnnnnnnnnnnnnnnnnnnnnnnnnnnnnnnnnnnnnnnnnnnnnnnnnnnnnnnnnnnnnnnnnnnnnnnnnnnnnnnnnnnnnnnnnnnnnnnnnnnnnnnnnnnnnnnnnnnnnnnnnnnnnnnnnnnnnnnnnnnnnnnnnnnnnnnnnnnnnnnnnnnnnnnnnnnnnnnnnnnnnnnnnnnnnnnnnnnnnnnnnnnnnnnnnnnnnnnnnnnnnnnnnnnnnnnnnnnnnnnnnnnnnnnnnnnnnnnnnnnnnnnnnnnnnnnnnnnnnnnnnnnnnnnnnnnnnnnnnnnnnnnnnnnnnnnnnnnnnnnnnnnnnnnnnnnnnnnnnnnnnnnnnnnnnnnnnnnnnnnnnnnnnnnnnnnnnnnnnnnnnnnnnnnnnnnnnnnnnnnnnnnnnnnnnnnnnnnnnnnnnnnnnnnnnnnnnnnnnnnnnnnnnnnnnnnnnnnnnnnnnnnnnnnnnnnnnnnnnnnnnnnnnnnnnnnnnnnnnnnnnnnnnnnnnnnnnnnnnnnnnnnnnnnnnnnnnnnnnnnnnnnnnnnnnnnnnnnnnnnnnnnnnnnnnnnnnnnnnnnnnnnnnnnnnnnnnnnnnnnnnnnnnnnnnnnnnnnnnnnnnnnnnnnnnnnnnnnnnnnnnnnnnnnnnnnnnnnnnnnnnnnnnnnnnnnnnnnnnnnnnnnnnnnnnnnnnnnnnnnnnnnnnnnnnnnnnnnnnnnnnnnnnnnnnnnnnnnnnnnnnnnnnnnnnnnnnnnnnnnnnnnnnnnnnnnnnnnnnnnnnnnnnnnnnnnnnnnnnnnnnnnnnnnnnnnnnnnnnnnnnnnnnnnnnnnnnnnnnnnnnnnnnnnnnnnnnnnnnnnnnnnnnnnnnnnnnnnnnnnnnnnnnnnnnnnnnnnnnnnnnnnnnnnnnnnnnnnnnnnnnnnnnnnnnnnnnnnnnnnnnnnnnnnnnnnnnnnnnnnnnnnnnnnnnnnnnnnnnnnnnnnnnnnnnnnnnnnnnnnnnnnnnnnnnnnnnnnnnnnnnnnnnnnnnnnnnnnnnnnnnnnnnnnnnnnnnnnnnnnnnnnnnnnnnnnnnnnnnnnnnnnnnnnnnnnnnnnnnnnnnnnnnnnnnnnnnnnnnnnnnnnnnnnnnnnnnnnnnnnnnnnnnnnnnnnnnnnnnnnnnnnnnnnnnnnnnnnnnnnnnnnnnnnnnnnnnnnnnnnnnnnnnnnnnnnnnnnnnnnnnnnnnnnnnnnnnnnnnnnnnnnnnnnnnnnnnnnnnnnnnnnnnnnnnnnnnnnnnnnnnnnnnnnnnnnnnnnnnnnnnnnnnnnnnnnnnnnnnnnnnnnnnnnnnnnnnnnnnnnnnnnnnnnnnnnnnnnnnnnnnnnnnnnnnnnnnnnnnnnnnnnnnnnnnnnnnnnnnnnnnnnnnnnnnnnnnnnnnnnnnnnnnnnnnnnnnnnnnnnnnnnnnnnnnnnnnnnnnnnnnnnnnnnnnnnnnnnnnnnnnnnnnnnnnnnnnnnnnnnnnnnnnnnnnnnnnnnnnnnnnnnnnnnnnnnnnnnnnnnnnnnnnnnnnnnnnnnnnnnnnnnnnnnnnnnnnnnnnnnnnnnnnnnnnnnnnnnnnnnnnnnnnnnnnnnnnnnnnnnnnnnnnnnnnnnnnnnnnnnnnnnnnnnnnnnnnnnnnnnnnnnnnnnnnnnnnnnnnnnnnnnnnnnnnnnnnnnnnnnnnnnnnnnnnnnnnnnnnnnnnnnnnnnnnnnnnnnnnnnnnnnnnnnnnnnnnnnnnnnnnnnnnnnnnnnnnnnnnnnnnnnnnnnnnnnnnnnnnnnnnnnnnnnnnnnnnnnnnnnnnnnnnnnnnnnnnnnnnnnnnnnnnnnnnnnnnnnnnnnnnnnnnnnnnnnnnnnnnnnnnnnnnnnnnnnnnnnnnnnnnnnnnnnnnnnnnnnnnnnnnnnnnnnnnnnnnnnnnnnnnnnnnnnnnnnnnnnnnnnnnnnnnnnnnnnnnnnnnnnnnnnnnnnnnnnnnnnnnnnnnnnnnnnnnnnnnnnnnnnnnnnnnnnnnnnnnnnnnnnnnnnnnnnnnnnnnnnnnnnnnnnnnnnnnnnnnnnnnnnnnnnnnnnnnnnnnnnnnnnnnnnnnnnnnnnnnnnnnnnnnnnnnnnnnnnnnnnnnnnnnnnnnnnnnnnnnnnnnnnnnnnnnnnnnnnnnnnnnnnnnnnnnnnnnnnnnnnnnnnnnnnnnnnnnnnnnnnnnnnnnnnnnnnnnnnnnnnnnnnnnnnnnnnnnnnnnnnnnnnnnnnnnnnnnnnnnnnnnnnnnnnnnnnnnnnnnnnnnnnnnnnnnnnnnnnnnnnnnnnnnnnnnnnnnnnnnnnnnnnnnnnnnnnnnnnnnnnnnnnnnnnnnnnnnnnnnnnnnnnnnnnnnnnnnnnnnnnnnnnnnnnnnnnnnnnnnnnnnnnnnnnnnnnnnnnnnnnnnnnnnnnnnnnnnnnnnnnnnnnnnnnnnnnnnnnnnnnnnnnnnnnnnnnnnnnnnnnnnnnnnnnnnnnnnnnnnnnnnnnnnnnnnnnnnnnnnnnnnnnnnnnnnnnnnnnnnnnnnnnnnnnnnnnnnnnnnnnnnnnnnnnnnnnnnnnnnnnnnnnnnnnnnnnnnnnnnnnnnnnnnnnnnnnnnnnnnnnnnnnnnnnnnnnnnnnnnnnnnnnnnnnnnnnnnnnnnnnnnnnnnnnnnnnnnnnnnnnnnnnnnnnnnnnnnnnnnnnnnnnnnnnnnnnnnnnnnnnnnnnnnnnnnnnnnnnnnnnnnnnnnnnnnnnnnnnnnnnnnnnnnnnnnnnnnnnnnnnnnnnnnnnnnnnnnnnnnnnnnnnnnnnnnnnnnnnnnnnnnnnnnnnnnnnnnnnnnnnnnnnnnnnnnnnnnnnnnnnnnnnnnnnnnnnnnnnnnnnnnnnnnnnnnnnnnnnnnnnnnnnnnnnnnnnnnnnnnnnnnnnnnnnnnnnnnnnnnnnnnnnnnnnnnnnnnnnnnnnnnnnnnnnnnnnnnnnnnnnnnnnnnnnnnnnnnnnnnnnnnnnnnnnnnnnnnnnnnnnnnnnnnnnnnnnnnnnnnnnnnnnnnnnnnnnnnnnnnnnnnnnnnnnnnnnnnnnnnnnnnnnnnnnnnnnnnnnnnnnnnnnnnnnnnnnnnnnnnnnnnnnnnnnnnnnnnnnnnnnnnnnnnnnnnnnnnnnnnnnnnnnnnnnnnnnnnnnnnnnnnnnnnnnnnnnnnnnnnnnnnnnnnnnnnnnnnnnnnnnnnnnnnnnnnnnnnnnnnnnnnnnnnnnnnnnnnnnnnnnnnnnnnnnnnnnnnnnnnnnnnnnnnnnnnnnnnnnnnnnnnnnnnnnnnnnnnnnnnnnnnnnnnnnnnnnnnnnnnnnnnnnnnnnnnnnnnnnnnnnnnnnnnnnnnnnnnnnnnnnnnnnnnnnnnnnnnnnnnnnnnnnnnnnnnnnnnnnnnnnnnnnnnnnnnnnnnnnnnnnnnnnnnnnnnnnnnnnnnnnnnnnnnnnnnnnnnnnnnnnnnnnnnnnnnnnnnnnnnnnnnnnnnnnnnnnnnnnnnnnnnnnnnnnnnnnnnnnnnnnnnnnnnnnnnnnnnnnnnnnnnnnnnnnnnnnnnnnnnnnnnnnnnnnnnnnnnnnnnnnnnnnnnnnnnnnnnnnnnnnnnnnnnnnnnnnnnnnnnnnnnnnnnnnnnnnnnnnnnnnnnnnnnnnnnnnnnnnnnnnnnnnnnnnnnnnnnnnnnnnnnnnnnnnnnnnnnnnnnnnnnnnnnnnnnnnnnnnnnnnnnnnnnnnnnnnnnnnnnnnnnnnnnnnnnnnnnnnnnnnnnnnnnnnnnnnnnnnnnnnnnnnnnnnnnnnnnnnnnnnnnnnnnnnnnnnnnnnnnnnnnnnnnnnnnnnnnnnnnnnnnnnnnnnnnnnnnnnnnnnnnnnnnnnnnnnnnnnnnnnnnnnnnnnnnnnnnnnnnnnnnnnnnnnnnnnnnnnnnnnnnnnnnnnnnnnnnnnnnnnnnnnnnnnnnnnnnnnnnnnnnnnnnnnnnnnnnnnnnnnnnnnnnnnnnnnnnnnnnnnnnnnnnnnnnnnnnnnnnnnnnnnnnnnnnnnnnnnnnnnnnnnnnnnnnnnnnnnnnnnnnnnnnnnnnnnnnnnnnnnnnnnnnnnnnnnnnnnnnnnnnnnnnnnnnnnnnnnnnnnnnnnnnnnnnnnnnnnnnnnnnnnnnnnnnnnnnnnnnnnnnnnnnnnnnnnnnnnnnnnnnnnnnnnnnnnnnnnnnnnnnnnnnnnnnnnnnnnnnnnnnnnnnnnnnnnnnnnnnnnnnnnnnnnnnnnnnnnnnnnnnnnnnnnnnnnnnnnnnnnnnnnnnnnnnnnnnnnnnnnnnnnnnnnnnnnnnnnnnnnnnnnnnnnnnnnnnnnnnnnnnnnnnnnnnnnnnnnnnnnnnnnnnnnnnnnnnnnnnnnnnnnnnnnnnnnnnnnnnnnnnnnnnnnnnnnnnnnnnnnnnnnnnnnnnnnnnnnnnnnnnnnnnnnnnnnnnnnnnnnnnnnnnnnnnnnnnnnnnnnnnnnnnnnnnnnnnnnnnnnnnnnnnnnnnnnnnnnnnnnnnnnnnnnnnnnnnnnnnnnnnnnnnnnnnnnnnnnnnnnnnnnnnnnnnnnnnnnnnnnnnnnnnnnnnnnnnnnnnnnnnnnnnnnnnnnnnnnnnnnnnnnnnnnnnnnnnnnnnnnnnnnnnnnnnnnnnnnnnnnnnnnnnnnnnnnnnnnnnnnnnnnnnnnnnnnnnnnnnnnnnnnnnnnnnnnnnnnnnnnnnnnnnnnnnnnnnnnnnnnnnnnnnnnnnnnnnnnnnnnnnnnnnnnnnnnnnnnnnnnnnnnnnnnnnnnnnnnnnnnnnnnnnnnnnnnnnnnnnnnnnnnnnnnnnnnnnnnnnnnnnnnnnnnnnnnnnnnnnnnnnnnnnnnnnnnnnnnnnnnnnnnnnnnnnnnnnnnnnnnnnnnnnnnnnnnnnnnnnnnnnnnnnnnnnnnnnnnnnnnnnnnnnnnnnnnnnnnnnnnnnnnnnnnnnnnnnnnnnnnnnnnnnnnnnnnnnnnnnnnnnnnnnnnnnnnnnnnnnnnnnnnnnnnnnnnnnnnnnnnnnnnnnnnnnnnnnnnnnnnnnnnnnnnnnnnnnnnnnnnnnnnnnnnnnnnnnnnnnnnnnnnnnnnnnnnnnnnnnnnnnnnnnnnnnnnnnnnnnnnnnnnnnnnnnnnnnnnnnnnnnnnnnnnnnnnnnnnnnnnnnnnnnnnnnnnnnnnnnnnnnnnnnnnnnnnnnnnnnnnnnnnnnnnnnnnnnnnnnnnnnnnnnnnnnnnnnnnnnnnnnnnnnnnnnnnnnnnnnnnnnnnnnnnnnnnnnnnnnnnnnnnnnnnnnnnnnnnnnnnnnnnnnnnnnnnnnnnnnnnnnnnnnnnnnnnnnnnnnnnnnnnnnnnnnnnnnnnnnnnnnnnnnnnnnnnnnnnnnnnnnnnnnnnnnnnnnnnnnnnnnnnnnnnnnnnnnnnnnnnnnnnnnnnnnnnnnnnnnnnnnnnnnnnnnnnnnnnnnnnnnnnnnnnnnnnnnnnnnnnnnnnnnnnnnnnnnnnnnnnnnnnnnnnnnnnnnnnnnnnnnnnnnnnnnnnnnnnnnnnnnnnnnnnnnnnnnnnnnnnnnnnnnnnnnnnnnnnnnnnnnnnnnnnnnnnnnnnnnnnnnnnnnnnnnnnnnnnnnnnnnnnnnnnnnnnnnnnnnnnnnnnnnnnnnnnnnnnnnnnnnnnnnnnnnnnnnnnnnnnnnnnnnnnnnnnnnnnnnnnnnnnnnnnnnnnnnnnnnnnnnnnnnnnnnnnnnnnnnnnnnnnnnnnnnnnnnnnnnnnnnnnnnnnnnnnnnnnnnnnnnnnnnnnnnnnnnnnnnnnnnnnnnnnnnnnnnnnnnnnnnnnnnnnnnnnnnnnnnnnnnnnnnnnnnnnnnnnnnnnnnnnnnnnnnnnnnnnnnnnnnnnnnnnnnnnnnnnnnnnnnnnnnnnnnnnnnnnnnnnnnnnnnnnnnnnnnnnnnnnnnnnnnnnnnnnnnnnnnnnnnnnnnnnnnnnnnnnnnnnnnnnnnnnnnnnnnnnnnnnnnnnnnnnnnnnnnnnnnnnnnnnnnnnnnnnnnnnnnnnnnnnnnnnnnnnnnnnnnnnnnnnnnnnnnnnnnnnnnnnnnnnnnnnnnnnnnnnnnnnnnnnnnnnnnnnnnnnnnnnnnnnnnnnnnnnnnnnnnnnnnnnnnnnnnnnnnnnnnnnnnnnnnnnnnnnnnnnnnnnnnnnnnnnnnnnnnnnnnnnnnnnnnnnnnnnnnnnnnnnnnnnnnnnnnnnnnnnnnnnnnnnnnnnnnnnnnnnnnnnnnnnnnnnnnnnnnnnnnnnnnnnnnnnnnnnnnnnnnnnnnnnnnnnnnnnnnnnnnnnnnnnnnnnnnnnnnnnnnnnnnnnnnnnnnnnnnnnnnnnnnnnnnnnnnnnnnnnnnnnnnnnnnnnnnnnnnnnnnnnnnnnnnnnnnnnnnnnnnnnnnnnnnnnnnnnnnnnnnnnnnnnnnnnnnnnnnnnnnnnnnnnnnnnnnnnnnnnnnnnnnnnnnnnnnnnnnnnnnnnnnnnnnnnnnnnnnnnnnnnnnnnnnnnnnnnnnnnnnnnnnnnnnnnnnnnnnnnnnnnnnnnnnnnnnnnnnnnnnnnnnnnnnnnnnnnnnnnnnnnnnnnnnnnnnnnnnnnnnnnnnnnnnnnnnnnnnnnnnnnnnnnnnnnnnnnnnnnnnnnnnnnnnnnnnnnnnnnnnnnnnnnnnnnnnnnnnnnnnnnnnnnnnnnnnnnnnnnnnnnnnnnnnnnnnnnnnnnnnnnnnnnnnnnnnnnnnnnnnnnnnnnnnnnnnnnnnnnnnnnnnnnnnnnnnnnnnnnnnnnnnnnnnnnnnnnnnnnnnnnnnnnnnnnnnnnnnnnnnnnnnnnnnnnnnnnnnnnnnnnnnnnnnnnnnnnnnnnnnnnnnnnnnnnnnnnnnnnnnnnnnnnnnnnnnnnnnnnnnnnnnnnnnnnnnnnnnnnnnnnnnnnnnnnnnnnnnnnnnnnnnnnnnnnnnnnnnnnnnnnnnnnnnnnnnnnnnnnnnnnnnnnnnnnnnnnnnnnnnnnnnnnnnnnnnnnnnnnnnnnnnnnnnnnnnnnnnnnnnnnnnnnnnnnnnnnnnnnnnnnnnnnnnnnnnnnnnnnnnnnnnnnnnnnnnnnnnnnnnnnnnnnnnnnnnnnnnnnnnnnnnnnnnnnnnnnnnnnnnnnnnnnnnnnnnnnnnnnnnnnnnnnnnnnnnnnnnnnnnnnnnnnnnnnnnnnnnnnnnnnnnnnnnnnnnnnnnnnnnnnnnnnnnnnnnnnnnnnnnnnnnnnnnnnnnnnnnnnnnnnnnnnnnnnnnnnnnnnnnnnnnnnnnnnnnnnnnnnnnnnnnnnnnnnnnnnnnnnnnnnnnnnnnnnnnnnnnnnnnnnnnnnnnnnnnnnnnnnnnnnnnnnnnnnnnnnnnnnnnnnnnnnnnnnnnnnnnnnnnnnnnnnnnnnnnnnnnnnnnnnnnnnnnnnnnnnnnnnnnnnnnnnnnnnnnnnnnnnnnnnnnnnnnnnnnnnnnnnnnnnnnnnnnnnnnnnnnnnnnnnnnnnnnnnnnnnnnnnnnnnnnnnnnnnnnnnnnnnnnnnnnnnnnnnnnnnnnnnnnnnnnnnnnnnnnnnnnnnnnnnnnnnnnnnnnnnnnnnnnnnnnnnnnnnnnnnnnnnnnnnnnnnnnnnnnnnnnnnnnnnnnnnnnnnnnnnnnnnnnnnnnnnnnnnnnnnnnnnnnnnnnnnnnnnnnnnnnnnnnnnnnnnnnnnnnnnnnnnnnnnnnnnnnnnnnnnnnnnnnnnnnnnnnnnnnnnnnnnnnnnnnnnnnnnnnnnnnnnnnnnnnnnnnnnnnnnnnnnnnnnnnnnnnnnnnnnnnnnnnnnnnnnnnnnnnnnnnnnnnnnnnnnnnnnnnnnnnnnnnnnnnnnnnnnnnnnnnnnnnnnnnnnnnnnnnnnnnnnnnnnnnnnnnnnnnnnnnnnnnnnnnnnnnnnnnnnnnnnnnnnnnnnnnnnnnnnnnnnnnnnnnnnnnnnnnnnnnnnnnnnnnnnnnnnnnnnnnnnnnnnnnnnnnnnnnnnnnnnnnnnnnnnnnnnnnnnnnnnnnnnnnnnnnnnnnnnnnnnnnnnnnnnnnnnnnnnnnnnnnnnnnnnnnnnnnnnnnnnnnnnnnnnnnnnnnnnnnnnnnnnnnnnnnnnnnnnnnnnnnnnnnnnnnnnnnnnnnnnnnnnnnnnnnnnnnnnnnnnnnnnnnnnnnnnnnnnnnnnnnnnnnnnnnnnnnnnnnnnnnnnnnnnnnnnnnnnnnnnnnnnnnnnnnnnnnnnnnnnnnnnnnnnnnnnnnnnnnnnnnnnnnnnnnnnnnnnnnnnnnnnnnnnnnnnnnnnnnnnnnnnnnnnnnnnnnnnnnnnnnnnnnnnnnnnnnnnnnnnnnnnnnnnnnnnnnnnnnnnnnnnnnnnnnnnnnnnnnnnnnnnnnnnnnnnnnnnnnnnnnnnnnnnnnnnnnnnnnnnnnnnnnnnnnnnnnnnnnnnnnnnnnnnnnnnnnnnnnnnnnnnnnnnnnnnnnnnnnnnnnnnnnnnnnnnnnnnnnnnnnnnnnnnnnnnnnnnnnnnnnnnnnnnnnnnnnnnnnnnnnnnnnnnnnnnnnnnnnnnnnnnnnnnnnnnnnnnnnnnnnnnnnnnnnnnnnnnnnnnnnnnnnnnnnnnnnnnnnnnnnnnnnnnnnnnnnnnnnnnnnnnnnnnnnnnnnnnnnnnnnnnnnnnnnnnnnnnnnnnnnnnnnnnnnnnnnnnnnnnnnnnnnnnnnnnnnnnnnnnnnnnnnnnnnnnnnnnnnnnnnnnnnnnnnnnnnnnnnnnnnnnnnnnnnnnnnnnnnnnnnnnnnnnnnnnnnnnnnnnnnnnnnnnnnnnnnnnnnnnnnnnnnnnnnnnnnnnnnnnnnnnnnnnnnnnnnnnnnnnnnnnnnnnnnnnnnnnnnnnnnnnnnnnnnnnnnnnnnnnnnnnnnnnnnnnnnnnnnnnnnnnnnnnnnnnnnnnnnnnnnnnnnnnnnnnnnnnnnnnnnnnnnnnnnnnnnnnnnnnnnnnnnnnnnnnnnnnnnnnnnnnnnnnnnnnnnnnnnnnnnnnnnnnnnnnnnnnnnnnnnnnnnnnnnnnnnnnnnnnnnnnnnnnnnnnnnnnnnnnnnnnnnnnnnnnnnnnnnnnnnnnnnnnnnnnnnnnnnnnnnnnnnnnnnnnnnnnnnnnnnnnnnnnnnnnnnnnnnnnnnnnnnnnnnnnnnnnnnnnnnnnnnnnnnnnnnnnnnnnnnnnnnnnnnnnnnnnnnnnnnnnnnnnnnnnnnnnnnnnnnnnnnnnnnnnnnnnnnnnnnnnnnnnnnnnnnnnnnnnnnnnnnnnnnnnnnnnnnnnnnnnnnnnnnnnnnnnnnnnnnnnnnnnnnnnnnnnnnnnnnnnnnnnnnnnnnnnnnnnnnnnnnnnnnnnnnnnnnnnnnnnnnnnnnnnnnnnnnnnnnnnnnnnnnnnnnnnnnnnnnnnnnnnnnnnnnnnnnnnnnnnnnnnnnnnnnnnnnnnnnnnnnnnnnnnnnnnnnnnnnnnnnnnnnnnnnnnnnnnnnnnnnnnnnnnnnnnnnnnnnnnnnnnnnnnnnnnnnnnnnnnnnnnnnnnnnnnnnnnnnnnnnnnnnnnnnnnnnnnnnnnnnnnnnnnnnnnnnnnnnnnnnnnnnnnnnnnnnnnnnnnnnnnnnnnnnnnnnnnnnnnnnnnnnnnnnnnnnnnnnnnnnnnnnnnnnnnnnnnnnnnnnnnnnnnnnnnnnnnnnnnnnnnnnnnnnnnnnnnnnnnnnnnnnnnnnnnnnnnnnnnnnnnnnnnnnnnnnnnnnnnnnnnnnnnnnnnnnnnnnnnnnnnnnnnnnnnnnnnnnnnnnnnnnnnnnnnnnnnnnnnnnnnnnnnnnnnnnnnnnnnnnnnnnnnnnnnnnnnnnnnnnnnnnnnnnnnnnnnnnnnnnnnnnnnnnnnnnnnnnnnnnnnnnnnnnnnnnnnnnnnnnnnnnnnnnnnnnnnnnnnnnnnnnnnnnnnnnnnnnnnnnnnnnnnnnnnnnnnnnnnnnnnnnnnnnnnnnnnnnnnnnnnnnnnnnnnnnnnnnnnnnnnnnnnnnnnnnnnnnnnnnnnnnnnnnnnnnnnnnnnnnnnnnnnnnnnnnnnnnnnnnnnnnnnnnnnnnnnnnnnnnnnnnnnnnnnnnnnnnnnnnnnnnnnnnnnnnnnnnnnnnnnnnnnnnnnnnnnnnnnnnnnnnnnnnnnnnnnnnnnnnnnnnnnnnnnnnnnnnnnnnnnnnnnnnnnnnnnnnnnnnnnnnnnnnnnnnnnnnnnnnnnnnnnnnnnnnnnnnnnnnnnnnnnnnnnnnnnnnnnnnnnnnnnnnnnnnnnnnnnnnnnnnnnnnnnnnnnnnnnnnnnnnnnnnnnnnnnnnnnnnnnnnnnnnnnnnnnnnnnnnnnnnnnnnnnnnnnnnnnnnnnnnnnnnnnnnnnnnnnnnnnnnnnnnnnnnnnnnnnnnnnnnnnnnnnnnnnnnnnnnnnnnnnnnnnnnnnnnnnnnnnnnnnnnnnnnnnnnnnnnnnnnnnnnnnnnnnnnnnnnnnnnnnnnnnnnnnnnnnnnnnnnnnnnnnnnnnnnnnnnnnnnnnnnnnnnnnnnnnnnnnnnnnnnnnnnnnnnnnnnnnnnnnnnnnnnnnnnnnnnnnnnnnnnnnnnnnnnnnnnnnnnnnnnnnnnnnnnnnnnnnnnnnnnnnnnnnnnnnnnnnnnnnnnnnnnnnnnnnnnnnnnnnnnnnnnnnnnnnnnnnnnnnnnnnnnnnnnnnnnnnnnnnnnnnnnnnnnnnnnnnnnnnnnnnnnnnnnnnnnnnnnnnnnnnnnnnnnnnnnnnnnnnnnnnnnnnnnnnnnnnnnnnnnnnnnnnnnnnnnnnnnnnnnnnnnnnnnnnnnnnnnnnnnnnnnnnnnnnnnnnnnnnnnnnnnnnnnnnnnnnnnnnnnnnnnnnnnnnnnnnnnnnnnnnnnnnnnnnnnnnnnnnnnnnnnnnnnnnnnnnnnnnnnnnnnnnnnnnnnnnnnnnnnnnnnnnnnnnnnnnnnnnnnnnnnnnnnnnnnnnnnnnnnnnnnnnnnnnnnnnnnnnnnnnnnnnnnnnnnnnnnnnnnnnnnnnnnnnnnnnnnnnnnnnnnnnnnnnnnnnnnnnnnnnnnnnnnnnnnnnnnnnnnnnnnnnnnnnnnnnnnnnnnnnnnnnnnnnnnnnnnnnnnnnnnnnnnnnnnnnnnnnnnnnnnnnnnnnnnnnnnnnnnnnnnnnnnnnnnnnnnnnnnnnnnnnnnnnnnnnnnnnnnnnnnnnnnnnnnnnnnnnnnnnnnnnnnnnnnnnnnnnnnnnnnnnnnnnnnnnnnnnnnnnnnnnnnnnnnnnnnnnnnnnnnnnnnnnnnnnnnnnnnnnnnnnnnnnnnnnnnnnnnnnnnnnnnnnnnnnnnnnnnnnnnnnnnnnnnnnnnnnnnnnnnnnnnnnnnnnnnnnnnnnnnnnnnnnnnnnnnnnnnnnnnnnnnnnnnnnnnnnnnnnnnnnnnnnnnnnnnnnnnnnnnnnnnnnnnnnnnnnnnnnnnnnnnnnnnnnnnnnnnnnnnnnnnnnnnnnnnnnnnnnnnnnnnnnnnnnnnnnnnnnnnnnnnnnnnnnnnnnnnnnnnnnnnnnnnnnnnnnnnnnnnnnnnnnnnnnnnnnnnnnnnnnnnnnnnnnnnnnnnnnnnnnnnnnnnnnnnnnnnnnnnnnnnnnnnnnnnnnnnnnnnnnnnnnnnnnnnnnnnnnnnnnnnnnnnnnnnnnnnnnnnnnnnnnnnnnnnnnnnnnnnnnnnnnnnnnnnnnnnnnnnnnnnnnnnnnnnnnnnnnnnnnnnnnnnnnnnnnnnnnnnnnnnnnnnnnnnnnnnnnnnnnnnnnnnnnnnnnnnnnnnnnnnnnnnnnnnnnnnnnnnnnnnnnnnnnnnnnnnnnnnnnnnnnnnnnnnnnnnnnnnnnnnnnnnnnnnnnnnnnnnnnnnnnnnnnnnnnnnnnnnnnnnnnnnnnnnnnnnnnnnnnnnnnnnnnnnnnnnnnnnnnnnnnnnnnnnnnnnnnnnnnnnnnnnnnnnnnnnnnnnnnnnnnnnnnnnnnnnnnnnnnnnnnnnnnnnnnnnnnnnnnnnnnnnnnnnnnnnnnnnnnnnnnnnnnnnnnnnnnnnnnnnnnnnnnnnnnnnnnnnnnnnnnnnnnnnnnnnnnnnnnnnnnnnnnnnnnnnnnnnnnnnnnnnnnnnnnnnnnnnnnnnnnnnnnnnnnnnnnnnnnnnnnnnnnnnnnnnnnnnnnnnnnnnnnnnnnnnnnnnnnnnnnnnnnnnnnnnnnnnnnnnnnnnnnnnnnnnnnnnnnnnnnnnnnnnnnnnnnnnnnnnnnnnnnnnnnnnnnnnnnnnnnnnnnnnnnnnnnnnnnnnnnnnnnnnnnnnnnnnnnnnnnnnnnnnnnnnnnnnnnnnnnnnnnnnnnnnnnnnnnnnnnnnnnnnnnnnnnnnnnnnnnnnnnnnnnnnnnnnnnnnnnnnnnnnnnnnnnnnnnnnnnnnnnnnnnnnnnnnnnnnnnnnnnnnnnnnnnnnnnnnnnnnnnnnnnnnnnnnnnnnnnnnnnnnnnnnnnnnnnnnnnnnnnnnnnnnnnnnnnnnnnnnnnnnnnnnnnnnnnnnnnnnnnnnnnnnnnnnnnnnnnnnnnnnnnnnnnnnnnnnnnnnnnnnnnnnnnnnnnnnnnnnnnnnnnnnnnnnnnnnnnnnnnnnnnnnnnnnnnnnnnnnnnnnnnnnnnnnnnnnnnnnnnnnnnnnnnnnnnnnnnnnnnnnnnnnnnnnnnnnnnnnnnnnnnnnnnnnnnnnnnnnnnnnnnnnnnnnnnnnnnnnnnnnnnnnnnnnnnnnnnnnnnnnnnnnnnnnnnnnnnnnnnnnnnnnnnnnnnnnnnnnnnnnnnnnnnnnnnnnnnnnnnnnnnnnnnnnnnnnnnnnnnnnnnnnnnnnnnnnnnnnnnnnnnnnnnnnnnnnnnnnnnnnnnnnnnnnnnnnnnnnnnnnnnnnnnnnnnnnnnnnnnnnnnnnnnnnnnnnnnnnnnnnnnnnnnnnnnnnnnnnnnnnnnnnnnnnnnnnnnnnnnnnnnnnnnnnnnnnnnnnnnnnnnnnnnnnnnnnnnnnnnnnnnnnnnnnnnnnnnnnnnnnnnnnnnnnnnnnnnnnnnnnnnnnnnnnnnnnnnnnnnnnnnnnnnnnnnnnnnnnnnnnnnnnnnnnnnnnnnnnnnnnnnnnnnnnnnnnnnnnnnnnnnnnnnnnnnnnnnnnnnnnnnnnnnnnnnnnnnnnnnnnnnnnnnnnnnnnnnnnnnnnnnnnnnnnnnnnnnnnnnnnnnnnnnnnnnnnnnnnnnnnnnnnnnnnnnnnnnnnnnnnnnnnnnnnnnnnnnnnnnnnnnnnnnnnnnnnnnnnnnnnnnnnnnnnnnnnnnnnnnnnnnnnnnnnnnnnnnnnnnnnnnnnnnnnnnnnnnnnnnnnnnnnnnnnnnnnnnnnnnnnnnnnnnnnnnnnnnnnnnnnnnnnnnnnnnnnnnnnnnnnnnnnnnnnnnnnnnnnnnnnnnnnnnnnnnnnnnnnnnnnnnnnnnnnnnnnnnnnnnnnnnnnnnnnnnnnnnnnnnnnnnnnnnnnnnnnnnnnnnnnnnnnnnnnnnnnnnnnnnnnnnnnnnnnnnnnnnnnnnnnnnnnnnnnnnnnnnnnnnnnnnnnnnnnnnnnnnnnnnnnnnnnnnnnnnnnnnnnnnnnnnnnnnnnnnnnnnnnnnnnnnnnnnnnnnnnnnnnnnnnnnnnnnnnnnnnnnnnnnnnnnnnnnnnnnnnnnnnnnnnnnnnnnnnnnnnnnnnnnnnnnnnnnnnnnnnnnnnnnnnnnnnnnnnnnnnnnnnnnnnnnnnnnnnnnnnnnnnnnnnnnnnnnnnnnnnnnnnnnnnnnnnnnnnnnnnnnnnnnnnnnnnnnnnnnnnnnnnnnnnnnnnnnnnnnnnnnnnnnnnnnnnnnnnnnnnnnnnnnnnnnnnnnnnnnnnnnnnnnnnnnnnnnnnnnnnnnnnnnnnnnnnnnnnnnnnnnnnnnnnnnnnnnnnnnnnnnnnnnnnnnnnnnnnnnnnnnnnnnnnnnnnnnnnnnnnnnnnnnnnnnnnnnnnnnnnnnnnnnnnnnnnnnnnnnnnnnnnnnnnnnnnnnnnnnnnnnnnnnnnnnnnnnnnnnnnnnnnnnnnnnnnnnnnnnnnnnnnnnnnnnnnnnnnnnnnnnnnnnnnnnnnnnnnnnnnnnnnnnnnnnnnnnnnnnnnnnnnnnnnnnnnnnnnnnnnnnnnnnnnnnnnnnnnnnnnnnnnnnnnnnnnnnnnnnnnnnnnnnnnnnnnnnnnnnnnnnnnnnnnnnnnnnnnnnnnnnnnnnnnnnnnnnnnnnnnnnnnnnnnnnnnnnnnnnnnnnnnnnnnnnnnnnnnnnnnnnnnnnnnnnnnnnnnnnnnnnnnnnnnnnnnnnnnnnnnnnnnnnnnnnnnnnnnnnnnnnnnnnnnnnnnnnnnnnnnnnnnnnnnnnnnnnnnnnnnnnnnnnnnnnnnnnnnnnnnnnnnnnnnnnnnnnnnnnnnnnnnnnnnnnnnnnnnnnnnnnnnnnnnnnnnnnnnnnnnnnnnnnnnnnnnnnnnnnnnnnnnnnnnnnnnnnnnnnnnnnnnnnnnnnnnnnnnnnnnnnnnnnnnnnnnnnnnnnnnnnnnnnnnnnnnnnnnnnnnnnnnnnnnnnnnnnnnnnnnnnnnnnnnnnnnnnnnnnnnnnnnnnnnnnnnnnnnnnnnnnnnnnnnnnnnnnnnnnnnnnnnnnnnnnnnnnnnnnnnnnnnnnnnnnnnnnnnnnnnnnnnnnnnnnnnnnnnnnnnnnnnnnnnnnnnnnnnnnnnnnnnnnnnnnnnnnnnnnnnnnnnnnnnnnnnnnnnnnnnnnnnnnnnnnnnnnnnnnnnnnnnnnnnnnnnnnnnnnnnnnnnnnnnnnnnnnnnnnnnnnnnnnnnnnnnnnnnnnnnnnnnnnnnnnnnnnnnnnnnnnnnnnnnnnnnnnnnnnnnnnnnnnnnnnnnnnnnnnnnnnnnnnnnnnnnnnnnnnnnnnnnnnnnnnnnnnnnnnnnnnnnnnnnnnnnnnnnnnnnnnnnnnnnnnnnnnnnnnnnnnnnnnnnnnnnnnnnnnnnnnnnnnnnnnnnnnnnnnnnnnnnnnnnnnnnnnnnnnnnnnnnnnnnnnnnnnnnnnnnnnnnnnnnnnnnnnnnnnnnnnnnnnnnnnnnnnnnnnnnnnnnnnnnnnnnnnnnnnnnnnnnnnnnnnnnnnnnnnnnnnnnnnnnnnnnnnnnnnnnnnnnnnnnnnnnnnnnnnnnnnnnnnnnnnnnnnnnnnnnnnnnnnnnnnnnnnnnnnnnnnnnnnnnnnnnnnnnnnnnnnnnnnnnnnnnnnnnnnnnnnnnnnnnnnnnnnnnnnnnnnnnnnnnnnnnnnnnnnnnnnnnnnnnnnnnnnnnnnnnnnnnnnnnnnnnnnnnnnnnnnnnnnnnnnnnnnnnnnnnnnnnnnnnnnnnnnnnnnnnnnnnnnnnnnnnnnnnnnnnnnnnnnnnnnnnnnnnnnnnnnnnnnnnnnnnnnnnnnnnnnnnnnnnnnnnnnnnnnnnnnnnnnnnnnnnnnnnnnnnnnnnnnnnnnnnnnnnnnnnnnnnnnnnnnnnnnnnnnnnnnnnnnnnnnnnnnnnnnnnnnnnnnnnnnnnnnnnnnnnnnnnnnnnnnnnnnnnnnnnnnnnnnnnnnnnnnnnnnnnnnnnnnnnnnnnnnnnnnnnnnnnnnnnnnnnnnnnnnnnnnnnnnnnnnnnnnnnnnnnnnnnnnnnnnnnnnnnnnnnnnnnnnnnnnnnnnnnnnnnnnnnnnnnnnnnnnnnnnnnnnnnnnnnnnnnnnnnnnnnnnnnnnnnnnnnnnnnnnnnnnnnnnnnnnnnnnnnnnnnnnnnnnnnnnnnnnnnnnnnnnnnnnnnnnnnnnnnnnnnnnnnnnnnnnnnnnnnnnnnnnnnnnnnnnnnnnnnnnnnnnnnnnnnnnnnnnnnnnnnnnnnnnnnnnnnnnnnnnnnnnnnnnnnnnnnnnnnnnnnnnnnnnnnnnnnnnnnnnnnnnnnnnnnnnnnnnnnnnnnnnnnnnnnnnnnnnnnnnnnnnnnnnnnnnnnnnnnnnnnnnnnnnnnnnnnnnnnnnnnnnnnnnnnnnnnnnnnnnnnnnnnnnnnnnnnnnnnnnnnnnnnnnnnnnnnnnnnnnnnnnnnnnnnnnnnnnnnnnnnnnnnnnnnnnnnnnnnnnnnnnnnnnnnnnnnnnnnnnnnnnnnnnnnnnnnnnnnnnnnnnnnnnnnnnnnnnnnnnnnnnnnnnnnnnnnnnnnnnnnnnnnnnnnnnnnnnnnnnnnnnnnnnnnnnnnnnnnnnnnnnnnnnnnnnnnnnnnnnnnnnnnnnnnnnnnnnnnnnnnnnnnnnnnnnnnnnnnnnnnnnnnnnnnnnnnnnnnnnnnnnnnnnnnnnnnnnnnnnnnnnnnnnnnnnnnnnnnnnnnnnnnnnnnnnnnnnnnnnnnnnnnnnnnnnnnnnnnnnnnnnnnnnnnnnnnnnnnnnnnnnnnnnnnnnnnnnnnnnnnnnnnnnnnnnnnnnnnnnnnnnnnnnnnnnnnnnnnnnnnnnnnnnnnnnnnnnnnnnnnnnnnnnnnnnnnnnnnnnnnnnnnnnnnnnnnnnnnnnnnnnnnnnnnnnnnnnnnnnnnnnnnnnnnnnnnnnnnnnnnnnnnnnnnnnnnnnnnnnnnnnnnnnnnnnnnnnnnnnnnnnnnnnnnnnnnnnnnnnnnnnnnnnnnnnnnnnnnnnnnnnnnnnnnnnnnnnnnnnnnnnnnnnnnnnnnnnnnnnnnnnnnnnnnnnnnnnnnnnnnnnnnnnnnnnnnnnnnnnnnnnnnnnnnnnnnnnnnnnnnnnnnnnnnnnnnnnnnnnnnnnnnnnnnnnnnnnnnnnnnnnnnnnnnnnnnnnnnnnnnnnnnnnnnnnnnnnnnnnnnnnnnnnnnnnnnnnnnnnnnnnnnnnnnnnnnnnnnnnnnnnnnnnnnnnnnnnnnnnnnnnnnnnnnnnnnnnnnnnnnnnnnnnnnnnnnnnnnnnnnnnnnnnnnnnnnnnnnnnnnnnnnnnnnnnnnnnnnnnnnnnnnnnnnnnnnnnnnnnnnnnnnnnnnnnnnnnnnnnnnnnnnnnnnnnnnnnnnnnnnnnnnnnnnnnnnnnnnnnnnnnnnnnnnnnnnnnnnnnnnnnnnnnnnnnnnnnnnnnnnnnnnnnnnnnnnnnnnnnnnnnnnnnnnnnnnnnnnnnnnnnnnnnnnnnnnnnnnnnnnnnnnnnnnnnnnnnnnnnnnnnnnnnnnnnnnnnnnnnnnnnnnnnnnnnnnnnnnnnnnnnnnnnnnnnnnnnnnnnnnnnnnnnnnnnnnnnnnnnnnnnnnnnnnnnnnnnnnnnnnnnnnnnnnnnnnnnnnnnnnnnnnnnnnnnnnnnnnnnnnnnnnnnnnnnnnnnnnnnnnnnnnnnnnnnnnnnnnnnnnnnnnnnnnnnnnnnnnnnnnnnnnnnnnnnnnnnnnnnnnnnnnnnnnnnnnnnnnnnnnnnnnnnnnnnnnnnnnnnnnnnnnnnnnnnnnnnnnnnnnnnnnnnnnnnnnnnnnnnnnnnnnnnnnnnnnnnnnnnnnnnnnnnnnnnnnnnnnnnnnnnnnnnnnnnnnnnnnnnnnnnnnnnnnnnnnnnnnnnnnnnnnnnnnnnnnnnnnnnnnnnnnnnnnnnnnnnnnnnnnnnnnnnnnnnnnnnnnnnnnnnnnnnnnnnnnnnnnnnnnnnnnnnnnnnnnnnnnnnnnnnnnnnnnnnnnnnnnnnnnnnnnnnnnnnnnnnnnnnnnnnnnnnnnnnnnnnnnnnnnnnnnnnnnnnnnnnnnnnnnnnnnnnnnnnnnnnnnnnnnnnnnnnnnnnnnnnnnnnnnnnnnnnnnnnnnnnnnnnnnnnnnnnnnnnnnnnnnnnnnnnnnnnnnnnnnnnnnnnnnnnnnnnnnnnnnnnnnnnnnnnnnnnnnnnnnnnnnnnnnnnnnnnnnnnnnnnnnnnnnnnnnnnnnnnnnnnnnnnnnnnnnnnnnnnnnnnnnnnnnnnnnnnnnnnnnnnnnnnnnnnnnnnnnnnnnnnnnnnnnnnnnnnnnnnnnnnnnnnnnnnnnnnnnnnnnnnnnnnnnnnnnnnnnnnnnnnnnnnnnnnnnnnnnnnnnnnnnnnnnnnnnnnnnnnnnnnnnnnnnnnnnnnnnnnnnnnnnnnnnnnnnnnnnnnnnnnnnnnnnnnnnnnnnnnnnnnnnnnnnnnnnnnnnnnnnnnnnnnnnnnnnnnnnnnnnnnnnnnnnnnnnnnnnnnnnnnnnnnnnnnnnnnnnnnnnnnnnnnnnnnnnnnnnnnnnnnnnnnnnnnnnnnnnnnnnnnnnnnnnnnnnnnnnnnnnnnnnnnnnnnnnnnnnnnnnnnnnnnnnnnnnnnnnnnnnnnnnnnnnnnnnnnnnnnnnnnnnnnnnnnnnnnnnnnnnnnnnnnnnnnnnnnnnnnnnnnnnnnnnnnnnnnnnnnnnnnnnnnnnnnnnnnnnnnnnnnnnnnnnnnnnnnnnnnnnnnnnnnnnnnnnnnnnnnnnnnnnnnnnnnnnnnnnnnnnnnnnnnnnnnnnnnnnnnnnnnnnnnnnnnnnnnnnnnnnnnnnnnnnnnnnnnnnnnnnnnnnnnnnnnnnnnnnnnnnnnnnnnnnnnnnnnnnnnnnnnnnnnnnnnnnnnnnnnnnnnnnnnnnnnnnnnnnnnnnnnnnnnnnnnnnnnnnnnnnnnnnnnnnnnnnnnnnnnnnnnnnnnnnnnnnnnnnnnnnnnnnnnnnnnnnnnnnnnnnnnnnnnnnnnnnnnnnnnnnnnnnnnnnnnnnnnnnnnnnnnnnnnnnnnnnnnnnnnnnnnnnnnnnnnnnnnnnnnnnnnnnnnnnnnnnnnnnnnnnnnnnnnnnnnnnnnnnnnnnnnnnnnnnnnnnnnnnnnnnnnnnnnnnnnnnnnnnnnnnnnnnnnnnnnnnnnnnnnnnnnnnnnnnnnnnnnnnnnnnnnnnnnnnnnnnnnnnnnnnnnnnnnnnnnnnnnnnnnnnnnnnnnnnnnnnnnnnnnnnnnnnnnnnnnnnnnnnnnnnnnnnnnnnnnnnnnnnnnnnnnnnnnnnnnnnnnnnnnnnnnnnnnnnnnnnnnnnnnnnnnnnnnnnnnnnnnnnnnnnnnnnnnnnnnnnnnnnnnnnnnnnnnnnnnnnnnnnnnnnnnnnnnnnnnnnnnnnnnnnnnnnnnnnnnnnnnnnnnnnnnnnnnnnnnnnnnnnnnnnnnnnnnnnnnnnnnnnnnnnnnnnnnnnnnnnnnnnnnnnnnnnnnnnnnnnnnnnnnnnnnnnnnnnnnnnnnnnnnnnnnnnnnnnnnnnnnnnnnnnnnnnnnnnnnnnnnnnnnnnnnnnnnnnnnnnnnnnnnnnnnnnnnnnnnnnnnnnnnnnnnnnnnnnnnnnnnnnnnnnnnnnnnnnnnnnnnnnnnnnnnnnnnnnnnnnnnnnnnnnnnnnnnnnnnnnnnnnnnnnnnnnnnnnnnnnnnnnnnnnnnnnnnnnnnnnnnnnnnnnnnnnnnnnnnnnnnnnnnnnnnnnnnnnnnnnnnnnnnnnnnnnnnnnnnnnnnnnnnnnnnnnnnnnnnnnnnnnnnnnnnnnnnnnnnnnnnnnnnnnnnnnnnnnnnnnnnnnnnnnnnnnnnnnnnnnnnnnnnnnnnnnnnnnnnnnnnnnnnnnnnnnnnnnnnnnnnnnnnnnnnnnnnnnnnnnnnnnnnnnnnnnnnnnnnnnnnnnnnnnnnnnnnnnnnnnnnnnnnnnnnnnnnnnnnnnnnnnnnnnnnnnnnnnnnnnnnnnnnnnnnnnnnnnnnnnnnnnnnnnnnnnnnnnnnnnnnnnnnnnnnnnnnnnnnnnnnnnnnnnnnnnnnnnnnnnnnnnnnnnnnnnnnnnnnnnnnnnnnnnnnnnnnnnnnnnnnnnnnnnnnnnnnnnnnnnnnnnnnnnnnnnnnnnnnnnnnnnnnnnnnnnnnnnnnnnnnnnnnnnnnnnnnnnnnnnnnnnnnnnnnnnnnnnnnnnnnnnnnnnnnnnnnnnnnnnnnnnnnnnnnnnnnnnnnnnnnnnnnnnnnnnnnnnnnnnnnnnnnnnnnnnnnnnnnnnnnnnnnnnnnnnnnnnnnnnnnnnnnnnnnnnnnnnnnnnnnnnnnnnnnnnnnnnnnnnnnnnnnnnnnnnnnnnnnnnnnnnnnnnnnnnnnnnnnnnnnnnnnnnnnnnnnnnnnnnnnnnnnnnnnnnnnnnnnnnnnnnnnnnnnnnnnnnnnnnnnnnnnnnnnnnnnnnnnnnnnnnnnnnnnnnnnnnnnnnnnnnnnnnnnnnnnnnnnnnnnnnnnnnnnnnnnnnnnnnnnnnnnnnnnnnnnnnnnnnnnnnnnnnnnnnnnnnnnnnnnnnnnnnnnnnnnnnnnnnnnnnnnnnnnnnnnnnnnnnnnnnnnnnnnnnnnnnnnnnnnnnnnnnnnnnnnnnnnnnnnnnnnnnnnnnnnnnnnnnnnnnnnnnnnnnnnnnnnnnnnnnnnnnnnnnnnnnnnnnnnnnnnnnnnnnnnnnnnnnnnnnnnnnnnnnnnnnnnnnnnnnnnnnnnnnnnnnnnnnnnnnnnnnnnnnnnnnnnnnnnnnnnnnnnnnnnnnnnnnnnnnnnnnnnnnnnnnnnnnnnnnnnnnnnnnnnnnnnnnnnnnnnnnnnnnnnnnnnnnnnnnnnnnnnnnnnnnnnnnnnnnnnnnnnnnnnnnnnnnnnnnnnnnnnnnnnnnnnnnnnnnnnnnnnnnnnnnnnnnnnnnnnnnnnnnnnnnnnnnnnnnnnnnnnnnnnnnnnnnnnnnnnnnnnnnnnnnnnnnnnnnnnnnnnnnnnnnnnnnnnnnnnnnnnnnnnnnnnnnnnnnnnnnnnnnnnnnnnnnnnnnnnnnnnnnnnnnnnnnnnnnnnnnnnnnnnnnnnnnnnnnnnnnnnnnnnnnnnnnnnnnnnnnnnnnnnnnnnnnnnnnnnnnnnnnnnnnnnnnnnnnnnnnnnnnnnnnnnnnnnnnnnnnnnnnnnnnnnnnnnnnnnnnnnnnnnnnnnnnnnnnnnnnnnnnnnnnnnnnnnnnnnnnnnnnnnnnnnnnnnnnnnnnnnnnnnnnnnnnnnnnnnnnnnnnnnnnnnnnnnnnnnnnnnnnnnnnnnnnnnnnnnnnnnnnnnnnnnnnnnnnnnnnnnnnnnnnnnnnnnnnnnnnnnnnnnnnnnnnnnnnnnnnnnnnnnnnnnnnnnnnnnnnnnnnnnnnnnnnnnnnnnnnnnnnnnnnnnnnnnnnnnnnnnnnnnnnnnnnnnnnnnnnnnnnnnnnnnnnnnnnnnnnnnnnnnnnnnnnnnnnnnnnnnnnnnnnnnnnnnnnnnnnnnnnnnnnnnnnnnnnnnnnnnnnnnnnnnnnnnnnnnnnnnnnnnnnnnnnnnnnnnnnnnnnnnnnnnnnnnnnnnnnnnnnnnnnnnnnnnnnnnnnnnnnnnnnnnnnnnnnnnnnnnnnnnnnnnnnnnnnnnnnnnnnnnnnnnnnnnnnnnnnnnnnnnnnnnnnnnnnnnnnnnnnnnnnnnnnnnnnnnnnnnnnnnnnnnnnnnnnnnnnnnnnnnnnnnnnnnnnnnnnnnnnnnnnnnnnnnnnnnnnnnnnnnnnnnnnnnnnnnnnnnnnnnnnnnnnnnnnnnnnnnnnnnnnnnnnnnnnnnnnnnnnnnnnnnnnnnnnnnnnnnnnnnnnnnnnnnnnnnnnnnnnnnnnnnnnnnnnnnnnnnnnnnnnnnnnnnnnnnnnnnnnnnnnnnnnnnnnnnnnnnnnnnnnnnnnnnnnnnnnnnnnnnnnnnnnnnnnnnnnnnnnnnnnnnnnnnnnnnnnnnnnnnnnnnnnnnnnnnnnnnnnnnnnnnnnnnnnnnnnnnnnnnnnnnnnnnnnnnnnnnnnnnnnnnnnnnnnnnnnnnnnnnnnnnnnnnnnnnnnnnnnnnnnnnnnnnnnnnnnnnnnnnnnnnnnnnnnnnnnnnnnnnnnnnnnnnnnnnnnnnnnnnnnnnnnnnnnnnnnnnnnnnnnnnnnnnnnnnnnnnnnnnnnnnnnnnnnnnnnnnnnnnnnnnnnnnnnnnnnnnnnnnnnnnnnnnnnnnnnnnnnnnnnnnnnnnnnnnnnnnnnnnnnnnnnnnnnnnnnnnnnnnnnnnnnnnnnnnnnnnnnnnnnnnnnnnnnnnnnnnnnnnnnnnnnnnnnnnnnnnnnnnnnnnnnnnnnnnnnnnnnnnnnnnnnnnnnnnnnnnnnnnnnnnnnnnnnnnnnnnnnnnnnnnnnnnnnnnnnnnnnnnnnnnnnnnnnnnnnnnnnnnnnnnnnnnnnnnnnnnnnnnnnnnnnnnnnnnnnnnnnnnnnnnnnnnnnnnnnnnnnnnnnnnnnnnnnnnnnnnnnnnnnnnnnnnnnnnnnnnnnnnnnnnnnnnnnnnnnnnnnnnnnnnnnnnnnnnnnnnnnnnnnnnnnnnnnnnnnnnnnnnnnnnnnnnnnnnnnnnnnnnnnnnnnnnnnnnnnnnnnnnnnnnnnnnnnnnnnnnnnnnnnnnnnnnnnnnnnnnnnnnnnnnnnnnnnnnnnnnnnnnnnnnnnnnnnnnnnnnnnnnnnnnnnnnnnnnnnnnnnnnnnnnnnnnnnnnnnnnnnnnnnnnnnnnnnnnnnnnnnnnnnnnnnnnnnnnnnnnnnnnnnnnnnnnnnnnnnnnnnnnnnnnnnnnnnnnnnnnnnnnnnnnnnnnnnnnnnnnnnnnnnnnnnnnnnnnnnnnnnnnnnnnnnnnnnnnnnnnnnnnnnnnnnnnnnnnnnnnnnnnnnnnnnnnnnnnnnnnnnnnnnnnnnnnnnnnnnnnnnnnnnnnnnnnnnnnnnnnnnnnnnnnnnnnnnnnnnnnnnnnnnnnnnnnnnnnnnnnnnnnnnnnnnnnnnnnnnnnnnnnnnnnnnnnnnnnnnnnnnnnnnnnnnnnnnnnnnnnnnnnnnnnnnnnnnnnnnnnnnnnnnnnnnnnnnnnnnnnnnnnnnnnnnnnnnnnnnnnnnnnnnnnnnnnnnnnnnnnnnnnnnnnnnnnnnnnnnnnnnnnnnnnnnnnnnnnnnnnnnnnnnnnnnnnnnnnnnnnnnnnnnnnnnnnnnnnnnnnnnnnnnnnnnnnnnnnnnnnnnnnnnnnnnnnnnnnnnnnnnnnnnnnnnnnnnnnnnnnnnnnnnnnnnnnnnnnnnnnnnnnnnnnnnnnnnnnnnnnnnnnnnnnnnnnnnnnnnnnnnnnnnnnnnnnnnnnnnnnnnnnnnnnnnnnnnnnnnnnnnnnnnnnnnnnnnnnnnnnnnnnnnnnnnnnnnnnnnnnnnnnnnnnnnnnnnnnnnnnnnnnnnnnnnnnnnnnnnnnnnnnnnnnnnnnnnnnnnnnnnnnnnnnnnnnnnnnnnnnnnnnnnnnnnnnnnnnnnnnnnnnnnnnnnnnnnnnnnnnnnnnnnnnnnnnnnnnnnnnnnnnnnnnnnnnnnnnnnnnnnnnnnnnnnnnnnnnnnnnnnnnnnnnnnnnnnnnnnnnnnnnnnnnnnnnnnnnnnnnnnnnnnnnnnnnnnnnnnnnnnnnnnnnnnnnnnnnnnnnnnnnnnnnnnnnnnnnnnnnnnnnnnnnnnnnnnnnnnnnnnnnnnnnnnnnnnnnnnnnnnnnnnnnnnnnnnnnnnnnnnnnnnnnnnnnnnnnnnnnnnnnnnnnnnnnnnnnnnnnnnnnnnnnnnnnnnnnnnnnnnnnnnnnnnnnnnnnnnnnnnnnnnnnnnnnnnnnnnnnnnnnnnnnnnnnnnnnnnnnnnnnnnnnnnnnnnnnnnnnnnnnnnnnnnnnnnnnnnnnnnnnnnnnnnnnnnnnnnnnnnnnnnnnnnnnnnnnnnnnnnnnnnnnnnnnnnnnnnnnnnnnnnnnnnnnnnnnnnnnnnnnnnnnnnnnnnnnnnnnnnnnnnnnnnnnnnnnnnnnnnnnnnnnnnnnnnnnnnnnnnnnnnnnnnnnnnnnnnnnnnnnnnnnnnnnnnnnnnnnnnnnnnnnnnnnnnnnnnnnnnnnnnnnnnnnnnnnnnnnnnnnnnnnnnnnnnnnnnnnnnnnnnnnnnnnnnnnnnnnnnnnnnnnnnnnnnnnnnnnnnnnnnnnnnnnnnnnnnnnnnnnnnnnnnnnnnnnnnnnnnnnnnnnnnnnnnnnnnnnnnnnnnnnnnnnnnnnnnnnnnnnnnnnnnnnnnnnnnnnnnnnnnnnnnnnnnnnnnnnnnnnnnnnnnnnnnnnnnnnnnnnnnnnnnnnnnnnnnnnnnnnnnnnnnnnnnnnnnnnnnnnnnnnnnnnnnnnnnnnnnnnnnnnnnnnnnnnnnnnnnnnnnnnnnnnnnnnnnnnnnnnnnnnnnnnnnnnnnnnnnnnnnnnnnnnnnnnnnnnnnnnnnnnnnnnnnnnnnnnnnnnnnnnnnnnnnnnnnnnnnnnnnnnnnnnnnnnnnnnnnnnnnnnnnnnnnnnnnnnnnnnnnnnnnnnnnnnnnnnnnnnnnnnnnnnnnnnnnnnnnnnnnnnnnnnnnnnnnnnnnnnnnnnnnnnnnnnnnnnnnnnnnnnnnnnnnnnnnnnnnnnnnnnnnnnnnnnnnnnnnnnnnnnnnnnnnnnnnnnnnnnnnnnnnnnnnnnnnnnnnnnnnnnnnnnnnnnnnnnnnnnnnnnnnnnnnnnnnnnnnnnnnnnnnnnnnnnnnnnnnnnnnnnnnnnnnnnnnnnnnnnnnnnnnnnnnnnnnnnnnnnnnnnnnnnnnnnnnnnnnnnnnnnnnnnnnnnnnnnnnnnnnnnnnnnnnnnnnnnnnnnnnnnnnnnnnnnnnnnnnnnnnnnnnnnnnnnnnnnnnnnnnnnnnnnnnnnnnnnnnnnnnnnnnnnnnnnnnnnnnnnnnnnnnnnnnnnnnnnnnnnnnnnnnnnnnnnnnnnnnnnnnnnnnnnnnnnnnnnnnnnnnnnnnnnnnnnnnnnnnnnnnnnnnnnnnnnnnnnnnnnnnnnnnnnnnnnnnnnnnnnnnnnnnnnnnnnnnnnnnnnnnnnnnnnnnnnnnnnnnnnnnnnnnnnnnnnnnnnnnnnnnnnnnnnnnnnnnnnnnnnnnnnnnnnnnnnnnnnnnnnnnnnnnnnnnnnnnnnnnnnnnnnnnnnnnnnnnnnnnnnnnnnnnnnnnnnnnnnnnnnnnnnnnnnnnnnnnnnnnnnnnnnnnnnnnnnnnnnnnnnnnnnnnnnnnnnnnnnnnnnnnnnnnnnnnnnnnnnnnnnnnnnnnnnnnnnnnnnnnnnnnnnnnnnnnnnnnnnnnnnnnnnnnnnnnnnnnnnnnnnnnnnnnnnnnnnnnnnnnnnnnnnnnnnnnnnnnnnnnnnnnnnnnnnnnnnnnnnnnnnnnnnnnnnnnnnnnnnnnnnnnnnnnnnnnnnnnnnnnnnnnnnnnnnnnnnnnnnnnnnnnnnnnnnnnnnnnnnnnnnnnnnnnnnnnnnnnnnnnnnnnnnnnnnnnnnnnnnnnnnnnnnnnnnnnnnnnnnnnnnnnnnnnnnnnnnnnnnnnnnnnnnnnnnnnnnnnnnnnnnnnnnnnnnnnnnnnnnnnnnnnnnnnnnnnnnnnnnnnnnnnnnnnnnnnnnnnnnnnnnnnnnnnnnnnnnnnnnnnnnnnnnnnnnnnnnnnnnnnnnnnnnnnnnnnnnnnnnnnnnnnnnnnnnnnnnnnnnnnnnnnnnnnnnnnnnnnnnnnnnnnnnnnnnnnnnnnnnnnnnnnnnnnnnnnnnnnnnnnnnnnnnnnnnnnnnnnnnnnnnnnnnnnnnnnnnnnnnnnnnnnnnnnnnnnnnnnnnnnnnnnnnnnnnnnnnnnnnnnnnnnnnnnnnnnnnnnnnnnnnnnnnnnnnnnnnnnnnnnnnnnnnnnnnnnnnnnnnnnnnnnnnnnnnnnnnnnnnnnnnnnnnnnnnnnnnnnnnnnnnnnnnnnnnnnnnnnnnnnnnnnnnnnnnnnnnnnnnnnnnnnnnnnnnnnnnnnnnnnnnnnnnnnnnnnnnnnnnnnnnnnnnnnnnnnnnnnnnnnnnnnnnnnnnnnnnnnnnnnnnnnnnnnnnnnnnnnnnnnnnnnnnnnnnnnnnnnnnnnnnnnnnnnnnnnnnnnnnnnnnnnnnnnnnnnnnnnnnnnnnnnnnnnnnnnnnnnnnnnnnnnnnnnnnnnnnnnnnnnnnnnnnnnnnnnnnnnnnnnnnnnnnnnnnnnnnnnnnnnnnnnnnnnnnnnnnnnnnnnnnnnnnnnnnnnnnnnnnnnnnnnnnnnnnnnnnnnnnnnnnnnnnnnnnnnnnnnnnnnnnnnnnnnnnnnnnnnnnnnnnnnnnnnnnnnnnnnnnnnnnnnnnnnnnnnnnnnnnnnnnnnnnnnnnnnnnnnnnnnnnnnnnnnnnnnnnnnnnnnnnnnnnnnnnnnnnnnnnnnnnnnnnnnnnnnnnnnnnnnnnnnnnnnnnnnnnnnnnnnnnnnnnnnnnnnnnnnnnnnnnnnnnnnnnnnnnnnnnnnnnnnnnnnnnnnnnnnnnnnnnnnnnnnnnnnnnnnnnnnnnnnnnnnnnnnnnnnnnnnnnnnnnnnnnnnnnnnnnnnnnnnnnnnnnnnnnnnnnnnnnnnnnnnnnnnnnnnnnnnnnnnnnnnnnnnnnnnnnnnnnnnnnnnnnnnnnnnnnnnnnnnnnnnnnnnnnnnnnnnnnnnnnnnnnnnnnnnnnnnnnnnnnnnnnnnnnnnnnnnnnnnnnnnnnnnnnnnnnnnnnnnnnnnnnnnnnnnnnnnnnnnnnnnnnnnnnnnnnnnnnnnnnnnnnnnnnnnnnnnnnnnnnnnnnnnnnnnnnnnnnnnnnnnnnnnnnnnnnnnnnnnnnnnnnnnnnnnnnnnnnnnnnnnnnnnnnnnnnnnnnnnnnnnnnnnnnnnnnnnnnnnnnnnnnnnnnnnnnnnnnnnnnnnnnnnnnnnnnnnnnnnnnnnnnnnnnnnnnnnnnnnnnnnnnnnnnnnnnnnnnnnnnnnnnnnnnnnnnnnnnnnnnnnnnnnnnnnnnnnnnnnnnnnnnnnnnnnnnnnnnnnnnnnnnnnnnnnnnnnnnnnnnnnnnnnnnnnnnnnnnnnnnnnnnnnnnnnnnnnnnnnnnnnnnnnnnnnnnnnnnnnnnnnnnnnnnnnnnnnnnnnnnnnnnnnnnnnnnnnnnnnnnnnnnnnnnnnnnnnnnnnnnnnnnnnnnnnnnnnnnnnnnnnnnnnnnnnnnnnnnnnnnnnnnnnnnnnnnnnnnnnnnnnnnnnnnnnnnnnnnnnnnnnnnnnnnnnnnnnnnnnnnnnnnnnnnnnnnnnnnnnnnnnnnnnnnnnnnnnnnnnnnnnnnnnnnnnnnnnnnnnnnnnnnnnnnnnnnnnnnnnnnnnnnnnnnnnnnnnnnnnnnnnnnnnnnnnnnnnnnnnnnnnnnnnnnnnnnnnnnnnnnnnnnnnnnnnnnnnnnnnnnnnnnnnnnnnnnnnnnnnnnnnnnnnnnnnnnnnnnnnnnnnnnnnnnnnnnnnnnnnnnnnnnnnnnnnnnnnnnnnnnnnnnnnnnnnnnnnnnnnnnnnnnnnnnnnnnnnnnnnnnnnnnnnnnnnnnnnnnnnnnnnnnnnnnnnnnnnnnnnnnnnnnnnnnnnnnnnnnnnnnnnnnnnnnnnnnnnnnnnnnnnnnnnnnnnnnnnnnnnnnnnnnnnnnnnnnnnnnnnnnnnnnnnnnnnnnnnnnnnnnnnnnnnnnnnnnnnnnnnnnnnnnnnnnnnnnnnnnnnnnnnnnnnnnnnnnnnnnnnnnnnnnnnnnnnnnnnnnnnnnnnnnnnnnnnnnnnnnnnnnnnnnnnnnnnnnnnnnnnnnnnnnnnnnnnnnnnnnnnnnnnnnnnnnnnnnnnnnnnnnnnnnnnnnnnnnnnnnnnnnnnnnnnnnnnnnnnnnnnnnnnnnnnnnnnnnnnnnnnnnnnnnnnnnnnnnnnnnnnnnnnnnnnnnnnnnnnnnnnnnnnnnnnnnnnnnnnnnnnnnnnnnnnnnnnnnnnnnnnnnnnnnnnnnnnnnnnnnnnnnnnnnnnnnnnnnnnnnnnnnnnnnnnnnnnnnnnnnnnnnnnnnnnnnnnnnnnnnnnnnnnnnnnnnnnnnnnnnnnnnnnnnnnnnnnnnnnnnnnnnnnnnnnnnnnnnnnnnnnnnnnnnnnnnnnnnnnnnnnnnnnnnnnnnnnnnnnnnnnnnnnnnnnnnnnnnnnnnnnnnnnnnnnnnnnnnnnnnnnnnnnnnnnnnnnnnnnnnnnnnnnnnnnnnnnnnnnnnnnnnnnnnnnnnnnnnnnnnnnnnnnnnnnnnnnnnnnnnnnnnnnnnnnnnnnnnnnnnnnnnnnnnnnnnnnnnnnnnnnnnnnnnnnnnnnnnnnnnnnnnnnnnnnnnnnnnnnnnnnnnnnnnnnnnnnnnnnnnnnnnnnnnnnnnnnnnnnnnnnnnnnnnnnnnnnnnnnnnnnnnnnnnnnnnnnnnnnnnnnnnnnnnnnnnnnnnnnnnnnnnnnnnnnnnnnnnnnnnnnnnnnnnnnnnnnnnnnnnnnnnnnnnnnnnnnnnnnnnnnnnnnnnnnnnnnnnnnnnnnnnnnnnnnnnnnnnnnnnnnnnnnnnnnnnnnnnnnnnnnnnnnnnnnnnnnnnnnnnnnnnnnnnnnnnnnnnnnnnnnnnnnnnnnnnnnnnnnnnnnnnnnnnnnnnnnnnnnnnnnnnnnnnnnnnnnnnnnnnnnnnnnnnnnnnnnnnnnnnnnnnnnnnnnnnnnnnnnnnnnnnnnnnnnnnnnnnnnnnnnnnnnnnnnnnnnnnnnnnnnnnnnnnnnnnnnnnnnnnnnnnnnnnnnnnnnnnnnnnnnnnnnnnnnnnnnnnnnnnnnnnnnnnnnnnnnnnnnnnnnnnnnnnnnnnnnnnnnnnnnnnnnnnnnnnnnnnnnnnnnnnnnnnnnnnnnnnnnnnnnnnnnnnnnnnnnnnnnnnnnnnnnnnnnnnnnnnnnnnnnnnnnnnnnnnnnnnnnnnnnnnnnnnnnnnnnnnnnnnnnnnnnnnnnnnnnnnnnnnnnnnnnnnnnnnnnnnnnnnnnnnnnnnnnnnnnnnnnnnnnnnnnnnnnnnnnnnnnnnnnnnnnnnnnnnnnnnnnnnnnnnnnnnnnnnnnnnnnnnnnnnnnnnnnnnnnnnnnnnnnnnnnnnnnnnnnnnnnnnnnnnnnnnnnnnnnnnnnnnnnnnnnnnnnnnnnnnnnnnnnnnnnnnnnnnnnnnnnnnnnnnnnnnnnnnnnnnnnnnnnnnnnnnnnnnnnnnnnnnnnnnnnnnnnnnnnnnnnnnnnnnnnnnnnnnnnnnnnnnnnnnnnnnnnnnnnnnnnnnnnnnnnnnnnnnnnnnnnnnnnnnnnnnnnnnnnnnnnnnnnnnnnnnnnnnnnnnnnnnnnnnnnnnnnnnnnnnnnnnnnnnnnnnnnnnnnnnnnnnnnnnnnnnnnnnnnnnnnnnnnnnnnnnnnnnnnnnnnnnnnnnnnnnnnnnnnnnnnnnnnnnnnnnnnnnnnnnnnnnnnnnnnnnnnnnnnnnnnnnnnnnnnnnnnnnnnnnnnnnnnnnnnnnnnnnnnnnnnnnnnnnnnnnnnnnnnnnnnnnnnnnnnnnnnnnnnnnnnnnnnnnnnnnnnnnnnnnnnnnnnnnnnnnnnnnnnnnnnnnnnnnnnnnnnnnnnnnnnnnnnnnnnnnnnnnnnnnnnnnnnnnnnnnnnnnnnnnnnnnnnnnnnnnnnnnnnnnnnnnnnnnnnnnnnnnnnnnnnnnnnnnnnnnnnnnnnnnnnnnnnnnnnnnnnnnnnnnnnnnnnnnnnnnnnnnnnnnnnnnnnnnnnnnnnnnnnnnnnnnnnnnnnnnnnnnnnnnnnnnnnnnnnnnnnnnnnnnnnnnnnnnnnnnnnnnnnnnnnnnnnnnnnnnnnnnnnnnnnnnnnnnnnnnnnnnnnnnnnnnnnnnnnnnnnnnnnnnnnnnnnnnnnnnnnnnnnnnnnnnnnnnnnnnnnnnnnnnnnnnnnnnnnnnnnnnnnnnnnnnnnnnnnnnnnnnnnnnnnnnnnnnnnnnnnnnnnnnnnnnnnnnnnnnnnnnnnnnnnnnnnnnnnnnnnnnnnnnnnnnnnnnnnnnnnnnnnnnnnnnnnnnnnnnnnnnnnnnnnnnnnnnnnnnnnnnnnnnnnnnnnnnnnnnnnnnnnnnnnnnnnnnnnnnnnnnnnnnnnnnnnnnnnnnnnnnnnnnnnnnnnnnnnnnnnnnnnnnnnnnnnnnnnnnnnnnnnnnnnnnnnnnnnnnnnnnnnnnnnnnnnnnnnnnnnnnnnnnnnnnnnnnnnnnnnnnnnnnnnnnnnnnnnnnnnnnnnnnnnnnnnnnnnnnnnnnnnnnnnnnnnnnnnnnnnnnnnnnnnnnnnnnnnnnnnnnnnnnnnnnnnnnnnnnnnnnnnnnnnnnnnnnnnnnnnnnnnnnnnnnnnnnnnnnnnnnnnnnnnnnnnnnnnnnnnnnnnnnnnnnnnnnnnnnnnnnnnnnnnnnnnnnnnnnnnnnnnnnnnnnnnnnnnnnnnnnnnnnnnnnnnnnnnnnnnnnnnnnnnnnnnnnnnnnnnnnnnnnnnnnnnnnnnnnnnnnnnnnnnnnnnnnnnnnnnnnnnnnnnnnnnnnnnnnnnnnnnnnnnnnnnnnnnnnnnnnnnnnnnnnnnnnnnnnnnnnnnnnnnnnnnnnnnnnnnnnnnnnnnnnnnnnnnnnnnnnnnnnnnnnnnnnnnnnnnnnnnnnnnnnnnnnnnnnnnnnnnnnnnnnnnnnnnnnnnnnnnnnnnnnnnnnnnnnnnnnnnnnnnnnnnnnnnnnnnnnnnnnnnnnnnnnnnnnnnnnnnnnnnnnnnnnnnnnnnnnnnnnnnnnnnnnnnnnnnnnnnnnnnnnnnnnnnnnnnnnnnnnnnnnnnnnnnnnnnnnnnnnnnnnnnnnnnnnnnnnnnnnnnnnnnnnnnnnnnnnnnnnnnnnnnnnnnnnnnnnnnnnnnnnnnnnnnnnnnnnnnnnnnnnnnnnnnnnnnnnnnnnnnnnnnnnnnnnnnnnnnnnnnnnnnnnnnnnnnnnnnnnnnnnnnnnnnnnnnnnnnnnnnnnnnnnnnnnnnnnnnnnnnnnnnnnnnnnnnnnnnnnnnnnnnnnnnnnnnnnnnnnnnnnnnnnnnnnnnnnnnnnnnnnnnnnnnnnnnnnnnnnnnnnnnnnnnnnnnnnnnnnnnnnnnnnnnnnnnnnnnnnnnnnnnnnnnnnnnnnnnnnnnnnnnnnnnnnnnnnnnnnnnnnnnnnnnnnnnnnnnnnnnnnnnnnnnnnnnnnnnnnnnnnnnnnnnnnnnnnnnnnnnnnnnnnnnnnnnnnnnnnnnnnnnnnnnnnnnnnnnnnnnnnnnnnnnnnnnnnnnnnnnnnnnnnnnnnnnnnnnnnnnnnnnnnnnnnnnnnnnnnnnnnnnnnnnnnnnnnnnnnnnnnnnnnnnnnnnnnnnnnnnnnnnnnnnnnnnnnnnnnnnnnnnnnnnnnnnnnnnnnnnnnnnnnnnnnnnnnnnnnnnnnnnnnnnnnnnnnnnnnnnnnnnnnnnnnnnnnnnnnnnnnnnnnnnnnnnnnnnnnnnnnnnnnnnnnnnnnnnnnnnnnnnnnnnnnnnnnnnnnnnnnnnnnnnnnnnnnnnnnnnnnnnnnnnnnnnnnnnnnnnnnnnnnnnnnnnnnnnnnnnnnnnnnnnnnnnnnnnnnnnnnnnnnnnnnnnnnnnnnnnnnnnnnnnnnnnnnnnnnnnnnnnnnnnnnnnnnnnnnnnnnnnnnnnnnnnnnnnnnnnnnnnnnnnnnnnnnnnnnnnnnnnnnnnnnnnnnnnnnnnnnnnnnnnnnnnnnnnnnnnnnnnnnnnnnnnnnnnnnnnnnnnnnnnnnnnnnnnnnnnnnnnnnnnnnnnnnnnnnnnnnnnnnnnnnnnnnnnnnnnnnnnnnnnnnnnnnnnnnnnnnnnnnnnnnnnnnnnnnnnnnnnnnnnnnnnnnnnnnnnnnnnnnnnnnnnnnnnnnnnnnnnnnnnnnnnnnnnnnnnnnnnnnnnnnnnnnnnnnnnnnnnnnnnnnnnnnnnnnnnnnnnnnnnnnnnnnnnnnnnnnnnnnnnnnnnnnnnnnnnnnnnnnnnnnnnnnnnnnnnnnnnnnnnnnnnnnnnnnnnnnnnnnnnnnnnnnnnnnnnnnnnnnnnnnnnnnnnnnnnnnnnnnnnnnnnnnnnnnnnnnnnnnnnnnnnnnnnnnnnnnnnnnnnnnnnnnnnnnnnnnnnnnnnnnnnnnnnnnnnnnnnnnnnnnnnnnnnnnnnnnnnnnnnnnnnnnnnnnnnnnnnnnnnnnnnnnnnnnnnnnnnnnnnnnnnnnnnnnnnnnnnnnnnnnnnnnnnnnnnnnnnnnnnnnnnnnnnnnnnnnnnnnnnnnnnnnnnnnnnnnnnnnnnnnnnnnnnnnnnnnnnnnnnnnnnnnnnnnnnnnnnnnnnnnnnnnnnnnnnnnnnnnnnnnnnnnnnnnnnnnnnnnnnnnnnnnnnnnnnnnnnnnnnnnnnnnnnnnnnnnnnnnnnnnnnnnnnnnnnnnnnnnnnnnnnnnnnnnnnnnnnnnnnnnnnnnnnnnnnnnnnnnnnnnnnnnnnnnnnnnnnnnnnnnnnnnnnnnnnnnnnnnnnnnnnnnnnnnnnnnnnnnnnnnnnnnnnnnnnnnnnnnnnnnnnnnnnnnnnnnnnnnnnnnnnnnnnnnnnnnnnnnnnnnnnnnnnnnnnnnnnnnnnnnnnnnnnnnnnnnnnnnnnnnnnnnnnnnnnnnnnnnnnnnnnnnnnnnnnnnnnnnnnnnnnnnnnnnnnnnnnnnnnnnnnnnnnnnnnnnnnnnnnnnnnnnnnnnnnnnnnnnnnnnnnnnnnnnnnnnnnnnnnnnnnnnnnnnnnnnnnnnnnnnnnnnnnnnnnnnnnnnnnnnnnnnnnnnnnnnnnnnnnnnnnnnnnnnnnnnnnnnnnnnnnnnnnnnnnnnnnnnnnnnnnnnnnnnnnnnnnnnnnnnnnnnnnnnnnnnnnnnnnnnnnnnnnnnnnnnnnnnnnnnnnnnnnnnnnnnnnnnnnnnnnnnnnnnnnnnnnnnnnnnnnnnnnnnnnnnnnnnnnnnnnnnnnnnnnnnnnnnnnnnnnnnnnnnnnnnnnnnnnnnnnnnnnnnnnnnnnnnnnnnnnnnnnnnnnnnnnnnnnnnnnnnnnnnnnnnnnnnnnnnnnnnnnnnnnnnnnnnnnnnnnnnnnnnnnnnnnnnnnnnnnnnnnnnnnnnnnnnnnnnnnnnnnnnnnnnnnnnnnnnnnnnnnnnnnnnnnnnnnnnnnnnnnnnnnnnnnnnnnnnnnnnnnnnnnnnnnnnnnnnnnnnnnnnnnnnnnnnnnnnnnnnnnnnnnnnnnnnnnnnnnnnnnnnnnnnnnnnnnnnnnnnnnnnnnnnnnnnnnnnnnnnnnnnnnnnnnnnnnnnnnnnnnnnnnnnnnnnnnnnnnnnnnnnnnnnnnnnnnnnnnnnnnnnnnnnnnnnnnnnnnnnnnnnnnnnnnnnnnnnnnnnnnnnnnnnnnnnnnnnnnnnnnnnnnnnnnnnnnnnnnnnnnnnnnnnnnnnnnnnnnnnnnnnnnnnnnnnnnnnnnnnnnnnnnnnnnnnnnnnnnnnnnnnnnnnnnnnnnnnnnnnnnnnnnnnnnnnnnnnnnnnnnnnnnnnnnnnnnnnnnnnnnnnnnnnnnnnnnnnnnnnnnnnnnnnnnnnnnnnnnnnnnnnnnnnnnnnnnnnnnnnnnnnnnnnnnnnnnnnnnnnnnnnnnnnnnnnnnnnnnnnnnnnnnnnnnnnnnnnnnnnnnnnnnnnnnnnnnnnnnnnnnnnnnnnnnnnnnnnnnnnnnnnnnnnnnnnnnnnnnnnnnnnnnnnnnnnnnnnnnnnnnnnnnnnnnnnnnnnnnnnnnnnnnnnnnnnnnnnnnnnnnnnnnnnnnnnnnnnnnnnnnnnnnnnnnnnnnnnnnnnnnnnnnnnnnnnnnnnnnnnnnnnnnnnnnnnnnnnnnnnnnnnnnnnnnnnnnnnnnnnnnnnnnnnnnnnnnnnnnnnnnnnnnnnnnnnnnnnnnnnnnnnnnnnnnnnnnnnnnnnnnnnnnnnnnnnnnnnnnnnnnnnnnnnnnnnnnnnnnnnnnnnnnnnnnnnnnnnnnnnnnnnnnnnnnnnnnnnnnnnnnnnnnnnnnnnnnnnnnnnnnnnnnnnnnnnnnnnnnnnnnnnnnnnnnnnnnnnnnnnnnnnnnnnnnnnnnnnnnnnnnnnnnnnnnnnnnnnnnnnnnnnnnnnnnnnnnnnnnnnnnnnnnnnnnnnnnnnnnnnnnnnnnnnnnnnnnnnnnnnnnnnnnnnnnnnnnnnnnnnnnnnnnnnnnnnnnnnnnnnnnnnnnnnnnnnnnnnnnnnnnnnnnnnnnnnnnnnnnnnnnnnnnnnnnnnnnnnnnnnnnnnnnnnnnnnnnnnnnnnnnnnnnnnnnnnnnnnnnnnnnnnnnnnnnnnnnnnnnnnnnnnnnnnnnnnnnnnnnnnnnnnnnnnnnnnnnnnnnnnnnnnnnnnnnnnnnnnnnnnnnnnnnnnnnnnnnnnnnnnnnnnnnnnnnnnnnnnnnnnnnnnnnnnnnnnnnnnnnnnnnnnnnnnnnnnnnnnnnnnnnnnnnnnnnnnnnnnnnnnnnnnnnnnnnnnnnnnnnnnnnnnnnnnnnnnnnnnnnnnnnnnnnnnnnnnnnnnnnnnnnnnnnnnnnnnnnnnnnnnnnnnnnnnnnnnnnnnnnnnnnnnnnnnnnnnnnnnnnnnnnnnnnnnnnnnnnnnnnnnnnnnnnnnnnnnnnnnnnnnnnnnnnnnnnnnnnnnnnnnnnnnnnnnnnnnnnnnnnnnnnnnnnnnnnnnnnnnnnnnnnnnnnnnnnnnnnnnnnnnnnnnnnnnnnnnnnnnnnnnnnnnnnnnnnnnnnnnnnnnnnnnnnnnnnnnnnnnnnnnnnnnnnnnnnnnnnnnnnnnnnnnnnnnnnnnnnnnnnnnnnnnnnnnnnnnnnnnnnnnnnnnnnnnnnnnnnnnnnnnnnnnnnnnnnnnnnnnnnnnnnnnnnnnnnnnnnnnnnnnnnnnnnnnnnnnnnnnnnnnnnnnnnnnnnnnnnnnnnnnnnnnnnnnnnnnnnnnnnnnnnnnnnnnnnnnnnnnnnnnnnnnnnnnnnnnnnnnnnnnnnnnnnnnnnnnnnnnnnnnnnnnnnnnnnnnnnnnnnnnnnnnnnnnnnnnnnnnnnnnnnnnnnnnnnnnnnnnnnnnnnnnnnnnnnnnnnnnnnnnnnnnnnnnnnnnnnnnnnnnnnnnnnnnnnnnnnnnnnnnnnnnnnnnnnnnnnnnnnnnnnnnnnnnnnnnnnnnnnnnnnnnnnnnnnnnnnnnnnnnnnnnnnnnnnnnnnnnnnnnnnnnnnnnnnnnnnnnnnnnnnnnnnnnnnnnnnnnnnnnnnnnnnnnnnnnnnnnnnnnnnnnnnnnnnnnnnnnnnnnnnnnnnnnnnnnnnnnnnnnnnnnnnnnnnnnnnnnnnnnnnnnnnnnnnnnnnnnnnnnnnnnnnnnnnnnnnnnnnnnnnnnnnnnnnnnnnnnnnnnnnnnnnnnnnnnnnnnnnnnnnnnnnnnnnnnnnnnnnnnnnnnnnnnnnnnnnnnnnnnnnnnnnnnnnnnnnnnnnnnnnnnnnnnnnnnnnnnnnnnnnnnnnnnnnnnnnnnnnnnnnnnnnnnnnnnnnnnnnnnnnnnnnnnnnnnnnnnnnnnnnnnnnnnnnnnnnnnnnnnnnnnnnnnnnnnnnnnnnnnnnnnnnnnnnnnnnnnnnnnnnnnnnnnnnnnnnnnnnnnnnnnnnnnnnnnnnnnnnnnnnnnnnnnnnnnnnnnnnnnnnnnnnnnnnnnnnnnnnnnnnnnnnnnnnnnnnnnnnnnnnnnnnnnnnnnnnnnnnnnnnnnnnnnnnnnnnnnnnnnnnnnnnnnnnnnnnnnnnnnnnnnnnnnnnnnnnnnnnnnnnnnnnnnnnnnnnnnnnnnnnnnnnnnnnnnnnnnnnnnnnnnnnnnnnnnnnnnnnnnnnnnnnnnnnnnnnnnnnnnnnnnnnnnnnnnnnnnnnnnnnnnnnnnnnnnnnnnnnnnnnnnnnnnnnnnnnnnnnnnnnnnnnnnnnnnnnnnnnnnnnnnnnnnnnnnnnnnnnnnnnnnnnnnnnnnnnnnnnnnnnnnnnnnnnnnnnnnnnnnnnnnnnnnnnnnnnnnnnnnnnnnnnnnnnnnnnnnnnnnnnnnnnnnnnnnnnnnnnnnnnnnnnnnnnnnnnnnnnnnnnnnnnnnnnnnnnnnnnnnnnnnnnnnnnnnnnnnnnnnnnnnnnnnnnnnnnnnnnnnnnnnnnnnnnnnnnnnnnnnnnnnnnnnnnnnnnnnnnnnnnnnnnnnnnnnnnnnnnnnnnnnnnnnnnnnnnnnnnnnnnnnnnnnnnnnnnnnnnnnnnnnnnnnnnnnnnnnnnnnnnnnnnnnnnnnnnnnnnnnnnnnnnnnnnnnnnnnnnnnnnnnnnnnnnnnnnnnnnnnnnnnnnnnnnnnnnnnnnnnnnnnnnnnnnnnnnnnnnnnnnnnnnnnnnnnnnnnnnnnnnnnnnnnnnnnnnnnnnnnnnnnnnnnnnnnnnnnnnnnnnnnnnnnnnnnnnnnnnnnnnnnnnnnnnnnnnnnnnnnnnnnnnnnnnnnnnnnnnnnnnnnnnnnnnnnnnnnnnnnnnnnnnnnnnnnnnnnnnnnnnnnnnnnnnnnnnnnnnnnnnnnnnnnnnnnnnnnnnnnnnnnnnnnnnnnnnnnnnnnnnnnnnnnnnnnnnnnnnnnnnnnnnnnnnnnnnnnnnnnnnnnnnnnnnnnnnnnnnnnnnnnnnnnnnnnnnnnnnnnnnnnnnnnnnnnnnnnnnnnnnnnnnnnnnnnnnnnnnnnnnnnnnnnnnnnnnnnnnnnnnnnnnnnnnnnnnnnnnnnnnnnnnnnnnnnnnnnnnnnnnnnnnnnnnnnnnnnnnnnnnnnnnnnnnnnnnnnnnnnnnnnnnnnnnnnnnnnnnnnnnnnnnnnnnnnnnnnnnnnnnnnnnnnnnnnnnnnnnnnnnnnnnnnnnnnnnnnnnnnnnnnnnnnnnnnnnnnnnnnnnnnnnnnnnnnnnnnnnnnnnnnnnnnnnnnnnnnnnnnnnnnnnnnnnnnnnnnnnnnnnnnnnnnnnnnnnnnnnnnnnnnnnnnnnnnnnnnnnnnnnnnnnnnnnnnnnnnnnnnnnnnnnnnnnnnnnnnnnnnnnnnnnnnnnnnnnnnnnnnnnnnnnnnnnnnnnnnnnnnnnnnnnnnnnnnnnnnnnnnnnnnnnnnnnnnnnnnnnnnnnnnnnnnnnnnnnnnnnnnnnnnnnnnnnnnnnnnnnnnnnnnnnnnnnnnnnnnnnnnnnnnnnnnnnnnnnnnnnnnnnnnnnnnnnnnnnnnnnnnnnnnnnnnnnnnnnnnnnnnnnnnnnnnnnnnnnnnnnnnnnnnnnnnnnnnnnnnnnnnnnnnnnnnnnnnnnnnnnnnnnnnnnnnnnnnnnnnnnnnnnnnnnnnnnnnnnnnnnnnnnnnnnnnnnnnnnnnnnnnnnnnnnnnnnnnnnnnnnnnnnnnnnnnnnnnnnnnnnnnnnnnnnnnnnnnnnnnnnnnnnnnnnnnnnnnnnnnnnnnnnnnnnnnnnnnnnnnnnnnnnnnnnnnnnnnnnnnnnnnnnnnnnnnnnnnnnnnnnnnnnnnnnnnnnnnnnnnnnnnnnnnnnnnnnnnnnnnnnnnnnnnnnnnnnnnnnnnnnnnnnnnnnnnnnnnnnnnnnnnnnnnnnnnnnnnnnnnnnnnnnnnnnnnnnnnnnnnnnnnnnnnnnnnnnnnnnnnnnnnnnnnnnnnnnnnnnnnnnnnnnnnnnnnnnnnnnnnnnnnnnnnnnnnnnnnnnnnnnnnnnnnnnnnnnnnnnnnnnnnnnnnnnnnnnnnnnnnnnnnnnnnnnnnnnnnnnnnnnnnnnnnnnnnnnnnnnnnnnnnnnnnnnnnnnnnnnnnnnnnnnnnnnnnnnnnnnnnnnnnnnnnnnnnnnnnnnnnnnnnnnnnnnnnnnnnnnnnnnnnnnnnnnnnnnnnnnnnnnnnnnnnnnnnnnnnnnnnnnnnnnnnnnnnnnnnnnnnnnnnnnnnnnnnnnnnnnnnnnnnnnnnnnnnnnnnnnnnnnnnnnnnnnnnnnnnnnnnnnnnnnnnnnnnnnnnnnnnnnnnnnnnnnnnnnnnnnnnnnnnnnnnnnnnnnnnnnnnnnnnnnnnnnnnnnnnnnnnnnnnnnnnnnnnnnnnnnnnnnnnnnnnnnnnnnnnnnnnnnnnnnnnnnnnnnnnnnnnnnnnnnnnnnnnnnnnnnnnnnnnnnnnnnnnnnnnnnnnnnnnnnnnnnnnnnnnnnnnnnnnnnnnnnnnnnnnnnnnnnnnnnnnnnnnnnnnnnnnnnnnnnnnnnnnnnnnnnnnnnnnnnnnnnnnnnnnnnnnnnnnnnnnnnnnnnnnnnnnnnnnnnnnnnnnnnnnnnnnnnnnnnnnnnnnnnnnnnnnnnnnnnnnnnnnnnnnnnnnnnnnnnnnnnnnnnnnnnnnnnnnnnnnnnnnnnnnnnnnnnnnnnnnnnnnnnnnnnnnnnnnnnnnnnnnnnnnnnnnnnnnnnnnnnnnnnnnnnnnnnnnnnnnnnnnnnnnnnnnnnnnnnnnnnnnnnnnnnnnnnnnnnnnnnnnnnnnnnnnnnnnnnnnnnnnnnnnnnnnnnnnnnnnnnnnnnnnnnnnnnnnnnnnnnnnnnnnnnnnnnnnnnnnnnnnnnnnnnnnnnnnnnnnnnnnnnnnnnnnnnnnnnnnnnnnnnnnnnnnnnnnnnnnnnnnnnnnnnnnnnnnnnnnnnnnnnnnnnnnnnnnnnnnnnnnnnnnnnnnnnnnnnnnnnnnnnnnnnnnnnnnnnnnnnnnnnnnnnnnnnnnnnnnnnnnnnnnnnnnnnnnnnnnnnnnnnnnnnnnnnnnnnnnnnnnnnnnnnnnnnnnnnnnnnnnnnnnnnnnnnnnnnnnnnnnnnnnnnnnnnnnnnnnnnnnnnnnnnnnnnnnnnnnnnnnnnnnnnnnnnnnnnnnnnnnnnnnnnnnnnnnnnnnnnnnnnnnnnnnnnnnnnnnnnnnnnnnnnnnnnnnnnnnnnnnnnnnnnnnnnnnnnnnnnnnnnnnnnnnnnnnnnnnnnnnnnnnnnnnnnnnnnnnnnnnnnnnnnnnnnnnnnnnnnnnnnnnnnnnnnnnnnnnnnnnnnnnnnnnnnnnnnnnnnnnnnnnnnnnnnnnnnnnnnnnnnnnnnnnnnnnnnnnnnnnnnnnnnnnnnnnnnnnnnnnnnnnnnnnnnnnnnnnnnnnnnnnnnnnnnnnnnnnnnnnnnnnnnnnnnnnnnnnnnnnnnnnnnnnnnnnnnnnnnnnnnnnnnnnnnnnnnnnnnnnnnnnnnnnnnnnnnnnnnnnnnnnnnnnnnnnnnnnnnnnnnnnnnnnnnnnnnnnnnnnnnnnnnnnnnnnnnnnnnnnnnnnnnnnnnnnnnnnnnnnnnnnnnnnnnnnnnnnnnnnnnnnnnnnnnnnnnnnnnnnnnnnnnnnnnnnnnnnnnnnnnnnnnnnnnnnnnnnnnnnnnnnnnnnnnnnnnnnnnnnnnnnnnnnnnnnnnnnnnnnnnnnnnnnnnnnnnnnnnnnnnnnnnnnnnnnnnnnnnnnnnnnnnnnnnnnnnnnnnnnnnnnnnnnnnnnnnnnnnnnnnnnnnnnnnnnnnnnnnnnnnnnnnnnnnnnnnnnnnnnnnnnnnnnnnnnnnnnnnnnnnnnnnnnnnnnnnnnnnnnnnnnnnnnnnnnnnnnnnnnnnnnnnnnnnnnnnnnnnnnnnnnnnnnnnnnnnnnnnnnnnnnnnnnnnnnnnnnnnnnnnnnnnnnnnnnnnnnnnnnnnnnnnnnnnnnnnnnnnnnnnnnnnnnnnnnnnnnnnnnnnnnnnnnnnnnnnnnnnnnnnnnnnnnnnnnnnnnnnnnnnnnnnnnnnnnnnnnnnnnnnnnnnnnnnnnnnnnnnnnnnnnnnnnnnnnnnnnnnnnnnnnnnnnnnnnnnnnnnnnnnnnnnnnnnnnnnnnnnnnnnnnnnnnnnnnnnnnnnnnnnnnnnnnnnnnnnnnnnnnnnnnnnnnnnnnnnnnnnnnnnnnnnnnnnnnnnnnnnnnnnnnnnnnnnnnnnnnnnnnnnnnnnnnnnnnnnnnnnnnnnnnnnnnnnnnnnnnnnnnnnnnnnnnnnnnnnnnnnnnnnnnnnnnnnnnnnnnnnnnnnnnnnnnnnnnnnnnnnnnnnnnnnnnnnnnnnnnnnnnnnnnnnnnnnnnnnnnnnnnnnnnnnnnnnnnnnnnnnnnnnnnnnnnnnnnnnnnnnnnnnnnnnnnnnnnnnnnnnnnnnnnnnnnnnnnnnnnnnnnnnnnnnnnnnnnnnnnnnnnnnnnnnnnnnnnnnnnnnnnnnnnnnnnnnnnnnnnnnnnnnnnnnnnnnnnnnnnnnnnnnnnnnnnnnnnnnnnnnnnnnnnnnnnnnnnnnnnnnnnnnnnnnnnnnnnnnnnnnnnnnnnnnnnnnnnnnnnnnnnnnnnnnnnnnnnnnnnnnnnnnnnnnnnnnnnnnnnnnnnnnnnnnnnnnnnnnnnnnnnnnnnnnnnnnnnnnnnnnnnnnnnnnnnnnnnnnnnnnnnnnnnnnnnnnnnnnnnnnnnnnnnnnnnnnnnnnnnnnnnnnnnnnnnnnnnnnnnnnnnnnnnnnnnnnnnnnnnnnnnnnnnnnnnnnnnnnnnnnnnnnnnnnnnnnnnnnnnnnnnnnnnnnnnnnnnnnnnnnnnnnnnnnnnnnnnnnnnnnnnnnnnnnnnnnnnnnnnnnnnnnnnnnnnnnnnnnnnnnnnnnnnnnnnnnnnnnnnnnnnnnnnnnnnnnnnnnnnnnnnnnnnnnnnnnnnnnnnnnnnnnnnnnnnnnnnnnnnnnnnnnnnnnnnnnnnnnnnnnnnnnnnnnnnnnnnnnnnnnnnnnnnnnnnnnnnnnnnnnnnnnnnnnnnnnnnnnnnnnnnnnnnnnnnnnnnnnnnnnnnnnnnnnnnnnnnnnnnnnnnnnnnnnnnnnnnnnnnnnnnnnnnnnnnnnnnnnnnnnnnnnnnnnnnnnnnnnnnnnnnnnnnnnnnnnnnnnnnnnnnnnnnnnnnnnnnnnnnnnnnnnnnnnnnnnnnnnnnnnnnnnnnnnnnnnnnnnnnnnnnnnnnnnnnnnnnnnnnnnnnnnnnnnnnnnnnnnnnnnnnnnnnnnnnnnnnnnnnnnnnnnnnnnnnnnnnnnnnnnnnnnnnnnnnnnnnnnnnnnnnnnnnnnnnnnnnnnnnnnnnnnnnnnnnnnnnnnnnnnnnnnnnnnnnnnnnnnnnnnnnnnnnnnnnnnnnnnnnnnnnnnnnnnnnnnnnnnnnnnnnnnnnnnnnnnnnnnnnnnnnnnnnnnnnnnnnnnnnnnnnnnnnnnnnnnnnnnnnnnnnnnnnnnnnnnnnnnnnnnnnnnnnnnnnnnnnnnnnnnnnnnnnnnnnnnnnnnnnnnnnnnnnnnnnnnnnnnnnnnnnnnnnnnnnnnnnnnnnnnnnnnnnnnnnnnnnnnnnnnnnnnnnnnnnnnnnnnnnnnnnnnnnnnnnnnnnnnnnnnnnnnnnnnnnnnnnnnnnnnnnnnnnnnnnnnnnnnnnnnnnnnnnnnnnnnnnnnnnnnnnnnnnnnnnnnnnnnnnnnnnnnnnnnnnnnnnnnnnnnnnnnnnnnnnnnnnnnnnnnnnnnnnnnnnnnnnnnnnnnnnnnnnnnnnnnnnnnnnnnnnnnnnnnnnnnnnnnnnnnnnnnnnnnnnnnnnnnnnnnnnnnnnnnnnnnnnnnnnnnnnnnnnnnnnnnnnnnnnnnnnnnnnnnnnnnnnnnnnnnnnnnnnnnnnnnnnnnnnnnnnnnnnnnnnnnnnnnnnnnnnnnnnnnnnnnnnnnnnnnnnnnnnnnnnnnnnnnnnnnnnnnnnnnnnnnnnnnnnnnnnnnnnnnnnnnnnnnnnnnnnnnnnnnnnnnnnnnnnnnnnnnnnnnnnnnnnnnnnnnnnnnnnnnnnnnnnnnnnnnnnnnnnnnnnnnnnnnnnnnnnnnnnnnnnnnnnnnnnnnnnnnnnnnnnnnnnnnnnnnnnnnnnnnnnnnnnnnnnnnnnnnnnnnnnnnnnnnnnnnnnnnnnnnnnnnnnnnnnnnnnnnnnnnnnnnnnnnnnnnnnnnnnnnnnnnnnnnnnnnnnnnnnnnnnnnnnnnnnnnnnnnnnnnnnnnnnnnnnnnnnnnnnnnnnnnnnnnnnnnnnnnnnnnnnnnnnnnnnnnnnnnnnnnnnnnnnnnnnnnnnnnnnnnnnnnnnnnnnnnnnnnnnnnnnnnnnnnnnnnnnnnnnnnnnnnnnnnnnnnnnnnnnnnnnnnnnnnnnnnnnnnnnnnnnnnnnnnnnnnnnnnnnnnnnnnnnnnnnnnnnnnnnnnnnnnnnnnnnnnnnnnnnnnnnnnnnnnnnnnnnnnnnnnnnnnnnnnnnnnnnnnnnnnnnnnnnnnnnnnnnnnnnnnnnnnnnnnnnnnnnnnnnnnnnnnnnnnnnnnnnnnnnnnnnnnnnnnnnnnnnnnnnnnnnnnnnnnnnnnnnnnnnnnnnnnnnnnnnnnnnnnnnnnnnnnnnnnnnnnnnnnnnnnnnnnnnnnnnnnnnnnnnnnnnnnnnnnnnnnnnnnnnnnnnnnnnnnnnnnnnnnnnnnnnnnnnnnnnnnnnnnnnnnnnnnnnnnnnnnnnnnnnnnnnnnnnnnnnnnnnnnnnnnnnnnnnnnnnnnnnnnnnnnnnnnnnnnnnnnnnnnnnnnnnnnnnnnnnnnnnnnnnnnnnnnnnnnnnnnnnnnnnnnnnnnnnnnnnnnnnnnnnnnnnnnnnnnnnnnnnnnnnnnnnnnnnnnnnnnnnnnnnnnnnnnnnnnnnnnnnnnnnnnnnnnnnnnnnnnnnnnnnnnnnnnnnnnnnnnnnnnnnnnnnnnnnnnnnnnnnnnnnnnnnnnnnnnnnnnnnnnnnnnnnnnnnnnnnnnnnnnnnnnnnnnnnnnnnnnnnnnnnnnnnnnnnnnnnnnnnnnnnnnnnnnnnnnnnnnnnnnnnnnnnnnnnnnnnnnnnnnnnnnnnnnnnnnnnnnnnnnnnnnnnnnnnnnnnnnnnnnnnnnnnnnnnnnnnnnnnnnnnnnnnnnnnnnnnnnnnnnnnnnnnnnnnnnnnnnnnnnnnnnnnnnnnnnnnnnnnnnnnnnnnnnnnnnnnnnnnnnnnnnnnnnnnnnnnnnnnnnnnnnnnnnnnnnnnnnnnnnnnnnnnnnnnnnnnnnnnnnnnnnnnnnnnnnnnnnnnnnnnnnnnnnnnnnnnnnnnnnnnnnnnnnnnnnnnnnnnnnnnnnnnnnnnnnnnnnnnnnnnnnnnnnnnnnnnnnnnnnnnnnnnnnnnnnnnnnnnnnnnnnnnnnnnnnnnnnnnnnnnnnnnnnnnnnnnnnnnnnnnnnnnnnnnnnnnnnnnnnnnnnnnnnnnnnnnnnnnnnnnnnnnnnnnnnnnnnnnnnnnnnnnnnnnnnnnnnnnnnnnnnnnnnnnnnnnnnnnnnnnnnnnnnnnnnnnnnnnnnnnnnnnnnnnnnnnnnnnnnnnnnnnnnnnnnnnnnnnnnnnnnnnnnnnnnnnnnnnnnnnnnnnnnnnnnnnnnnnnnnnnnnnnnnnnnnnnnnnnnnnnnnnnnnnnnnnnnnnnnnnnnnnnnnnnnnnnnnnnnnnnnnnnnnnnnnnnnnnnnnnnnnnnnnnnnnnnnnnnnnnnnnnnnnnnnnnnnnnnnnnnnnnnnnnnnnnnnnnnnnnnnnnnnnnnnnnnnnnnnnnnnnnnnnnnnnnnnnnnnnnnnnnnnnnnnnnnnnnnnnnnnnnnnnnnnnnnnnnnnnnnnnnnnnnnnnnnnnnnnnnnnnnnnnnnnnnnnnnnnnnnnnnnnnnnnnnnnnnnnnnnnnnnnnnnnnnnnnnnnnnnnnnnnnnnnnnnnnnnnnnnnnnnnnnnnnnnnnnnnnnnnnnnnnnnnnnnnnnnnnnnnnnnnnnnnnnnnnnnnnnnnnnnnnnnnnnnnnnnnnnnnnnnnnnnnnnnnnnnnnnnnnnnnnnnnnnnnnnnnnnnnnnnnnnnnnnnnnnnnnnnnnnnnnnnnnnnnnnnnnnnnnnnnnnnnnnnnnnnnnnnnnnnnnnnnnnnnnnnnnnnnnnnnnnnnnnnnnnnnnnnnnnnnnnnnnnnnnnnnnnnnnnnnnnnnnnnnnnnnnnnnnnnnnnnnnnnnnnnnnnnnnnnnnnnnnnnnnnnnnnnnnnnnnnnnnnnnnnnnnnnnnnnnnnnnnnnnnnnnnnnnnnnnnnnnnnnnnnnnnnnnnnnnnnnnnnnnnnnnnnnnnnnnnnnnnnnnnnnnnnnnnnnnnnnnnnnnnnnnnnnnnnnnnnnnnnnnnnnnnnnnnnnnnnnnnnnnnnnnnnnnnnnnnnnnnnnnnnnnnnnnnnnnnnnnnnnnnnnnnnnnnnnnnnnnnnnnnnnnnnnnnnnnnnnnnnnnnnnnnnnnnnnnnnnnnnnnnnnnnnnnnnnnnnnnnnnnnnnnnnnnnnnnnnnnnnnnnnnnnnnnnnnnnnnnnnnnnnnnnnnnnnnnnnnnnnnnnnnnnnnnnnnnnnnnnnnnnnnnnnnnnnnnnnnnnnnnnnnnnnnnnnnnnnnnnnnnnnnnnnnnnnnnnnnnnnnnnnnnnnnnnnnnnnnnnnnnnnnnnnnnnnnnnnnnnnnnnnnnnnnnnnnnnnnnnnnnnnnnnnnnnnnnnnnnnnnnnnnnnnnnnnnnnnnnnnnnnnnnnnnnnnnnnnnnnnnnnnnnnnnnnnnnnnnnnnnnnnnnnnnnnnnnnnnnnnnnnnnnnnnnnnnnnnnnnnnnnnnnnnnnnnnnnnnnnnnnnnnnnnnnnnnnnnnnnnnnnnnnnnnnnnnnnnnnnnnnnnnnnnnnnnnnnnnnnnnnnnnnnnnnnnnnnnnnnnnnnnnnnnnnnnnnnnnnnnnnnnnnnnnnnnnnnnnnnnnnnnnnnnnnnnnnnnnnnnnnnnnnnnnnnnnnnnnnnnnnnnnnnnnnnnnnnnnnnnnnnnnnnnnnnnnnnnnnnnnnnnnnnnnnnnnnnnnnnnnnnnnnnnnnnnnnnnnnnnnnnnnnnnnnnnnnnnnnnnnnnnnnnnnnnnnnnnnnnnnnnnnnnnnnnnnnnnnnnnnnnnnnnnnnnnnnnnnnnnnnnnnnnnnnnnnnnnnnnnnnnnnnnnnnnnnnnnnnnnnnnnnnnnnnnnnnnnnnnnnnnnnnnnnnnnnnnnnnnnnnnnnnnnnnnnnnnnnnnnnnnnnnnnnnnnnnnnnnnnnnnnnnnnnnnnnnnnnnnnnnnnnnnnnnnnnnnnnnnnnnnnnnnnnnnnnnnnnnnnnnnnnnnnnnnnnnnnnnnnnnnnnnnnnnnnnnnnnnnnnnnnnnnnnnnnnnnnnnnnnnnnnnnnnnnnnnnnnnnnnnnnnnnnnnnnnnnnnnnnnnnnnnnnnnnnnnnnnnnnnnnnnnnnnnnnnnnnnnnnnnnnnnnnnnnnnnnnnnnnnnnnnnnnnnnnnnnnnnnnnnnnnnnnnnnnnnnnnnnnnnnnnnnnnnnnnnnnnnnnnnnnnnnnnnnnnnnnnnnnnnnnnnnnnnnnnnnnnnnnnnnnnnnnnnnnnnnnnnnnnnnnnnnnnnnnnnnnnnnnnnnnnnnnnnnnnnnnnnnnnnnnnnnnnnnnnnnnnnnnnnnnnnnnnnnnnnnnnnnnnnnnnnnnnnnnnnnnnnnnnnnnnnnnnnnnnnnnnnnnnnnnnnnnnnnnnnnnnnnnnnnnnnnnnnnnnnnnnnnnnnnnnnnnnnnnnnnnnnnnnnnnnnnnnnnnnnnnnnnnnnnnnnnnnnnnnnnnnnnnnnnnnnnnnnnnnnnnnnnnnnnnnnnnnnnnnnnnnnnnnnnnnnnnnnnnnnnnnnnnnnnnnnnnnnnnnnnnnnnnnnnnnnnnnnnnnnnnnnnnnnnnnnnnnnnnnnnnnnnnnnnnnnnnnnnnnnnnnnnnnnnnnnnnnnnnnnnnnnnnnnnnnnnnnnnnnnnnnnnnnnnnnnnnnnnnnnnnnnnnnnnnnnnnnnnnnnnnnnnnnnnnnnnnnnnnnnnnnnnnnnnnnnnnnnnnnnnnnnnnnnnnnnnnnnnnnnnnnnnnnnnnnnnnnnnnnnnnnnnnnnnnnnnnnnnnnnnnnnnnnnnnnnnnnnnnnnnnnnnnnnnnnnnnnnnnnnnnnnnnnnnnnnnnnnnnnnnnnnnnnnnnnnnnnnnnnnnnnnnnnnnnnnnnnnnnnnnnnnnnnnnnnnnnnnnnnnnnnnnnnnnnnnnnnnnnnnnnnnnnnnnnnnnnnnnnnnnnnnnnnnnnnnnnnnnnnnnnnnnnnnnnnnnnnnnnnnnnnnnnnnnnnnnnnnnnnnnnnnnnnnnnnnnnnnnnnnnnnnnnnnnnnnnnnnnnnnnnnnnnnnnnnnnnnnnnnnnnnnnnnnnnnnnnnnnnnnnnnnnnnnnnnnnnnnnnnnnnnnnnnnnnnnnnnnnnnnnnnnnnnnnnnnnnnnnnnnnnnnnnnnnnnnnnnnnnnnnnnnnnnnnnnnnnnnnnnnnnnnnnnnnnnnnnnnnnnnnnnnnnnnnnnnnnnnnnnnnnnnnnnnnnnnnnnnnnnnnnnnnnnnnnnnnnnnnnnnnnnnnnnnnnnnnnnnnnnnnnnnnnnnnnnnnnnnnnnnnnnnnnnnnnnnnnnnnnnnnnnnnnnnnnnnnnnnnnnnnnnnnnnnnnnnnnnnnnnnnnnnnnnnnnnnnnnnnnnnnnnnnnnnnnnnnnnnnnnnnnnnnnnnnnnnnnnnnnnnnnnnnnnnnnnnnnnnnnnnnnnnnnnnnnnnnnnnnnnnnnnnnnnnnnnnnnnnnnnnnnnnnnnnnnnnnnnnnnnnnnnnnnnnnnnnnnnnnnnnnnnnnnnnnnnnnnnnnnnnnnnnnnnnnnnnnnnnnnnnnnnnnnnnnnnnnnnnnnnnnnnnnnnnnnnnnnnnnnnnnnnnnnnnnnnnnnnnnnnnnnnnnnnnnnnnnnnnnnnnnnnnnnnnnnnnnnnnnnnnnnnnnnnnnnnnnnnnnnnnnnnnnnnnnnnnnnnnnnnnnnnnnnnnnnnnnnnnnnnnnnnnnnnnnnnnnnnnnnnnnnnnnnnnnnnnnnnnnnnnnnnnnnnnnnnnnnnnnnnnnnnnnnnnnnnnnnnnnnnnnnnnnnnnnnnnnnnnnnnnnnnnnnnnnnnnnnnnnnnnnnnnnnnnnnnnnnnnnnnnnnnnnnnnnnnnnnnnnnnnnnnnnnnnnnnnnnnnnnnnnnnnnnnnnnnnnnnnnnnnnnnnnnnnnnnnnnnnnnnnnnnnnnnnnnnnnnnnnnnnnnnnnnnnnnnnnnnnnnnnnnnnnnnnnnnnnnnnnnnnnnnnnnnnnnnnnnnnnnnnnnnnnnnnnnnnnnnnnnnnnnnnnnnnnnnnnnnnnnnnnnnnnnnnnnnnnnnnnnnnnnnnnnnnnnnnnnnnnnnnnnnnnnnnnnnnnnnnnnnnnnnnnnnnnnnnnnnnnnnnnnnnnnnnnnnnnnnnnnnnnnnnnnnnnnnnnnnnnnnnnnnnnnnnnnnnnnnnnnnnnnnnnnnnnnnnnnnnnnnnnnnnnnnnnnnnnnnnnnnnnnnnnnnnnnnnnnnnnnnnnnnnnnnnnnnnnnnnnnnnnnnnnnnnnnnnnnnnnnnnnnnnnnnnnnnnnnnnnnnnnnnnnnnnnnnnnnnnnnnnnnnnnnnnnnnnnnnnnnnnnnnnnnnnnnnnnnnnnnnnnnnnnnnnnnnnnnnnnnnnnnnnnnnnnnnnnnnnnnnnnnnnnnnnnnnnnnnnnnnnnnnnnnnnnnnnnnnnnnnnnnnnnnnnnnnnnnnnnnnnnnnnnnnnnnnnnnnnnnnnnnnnnnnnnnnnnnnnnnnnnnnnnnnnnnnnnnnnnnnnnnnnnnnnnnnnnnnnnnnnnnnnnnnnnnnnnnnnnnnnnnnnnnnnnnnnnnnnnnnnnnnnnnnnnnnnnnnnnnnnnnnnnnnnnnnnnnnnnnnnnnnnnnnnnnnnnnnnnnnnnnnnnnnnnnnnnnnnnnnnnnnnnnnnnnnnnnnnnnnnnnnnnnnnnnnnnnnnnnnnnnnnnnnnnnnnnnnnnnnnnnnnnnnnnnnnnnnnnnnnnnnnnnnnnnnnnnnnnnnnnnnnnnnnnnnnnnnnnnnnnnnnnnnnnnnnnnnnnnnnnnnnnnnnnnnnnnnnnnnnnnnnnnnnnnnnnnnnnnnnnnnnnnnnnnnnnnnnnnnnnnnnnnnnnnnnnnnnnnnnnnnnnnnnnnnnnnnnnnnnnnnnnnnnnnnnnnnnnnnnnnnnnnnnnnnnnnnnnnnnnnnnnnnnnnnnnnnnnnnnnnnnnnnnnnnnnnnnnnnnnnnnnnnnnnnnnnnnnnnnnnnnnnnnnnnnnnnnnnnnnnnnnnnnnnnnnnnnnnnnnnnnnnnnnnnnnnnnnnnnnnnnnnnnnnnnnnnnnnnnnnnnnnnnnnnnnnnnnnnnnnnnnnnnnnnnnnnnnnnnnnnnnnnnnnnnnnnnnnnnnnnnnnnnnnnnnnnnnnnnnnnnnnnnnnnnnnnnnnnnnnnnnnnnnnnnnnnnnnnnnnnnnnnnnnnnnnnnnnnnnnnnnnnnnnnnnnnnnnnnnnnnnnnnnnnnnnnnnnnnnnnnnnnnnnnnnnnnnnnnnnnnnnnnnnnnnnnnnnnnnnnnnnnnnnnnnnnnnnnnnnnnnnnnnnnnnnnnnnnnnnnnnnnnnnnnnnnnnnnnnnnnnnnnnnnnnnnnnnnnnnnnnnnnnnnnnnnnnnnnnnnnnnnnnnnnnnnnnnnnnnnnnnnnnnnnnnnnnnnnnnnnnnnnnnnnnnnnnnnnnnnnnnnnnnnnnnnnnnnnnnnnnnnnnnnnnnnnnnnnnnnnnnnnnnnnnnnnnnnnnnnnnnnnnnnnnnnnnnnnnnnnnnnnnnnnnnnnnnnnnnnnnnnnnnnnnnnnnnnnnnnnnnnnnnnnnnnnnnnnnnnnnnnnnnnnnnnnnnnnnnnnnnnnnnnnnnnnnnnnnnnnnnnnnnnnnnnnnnnnnnnnnnnnnnnnnnnnnnnnnnnnnnnnnnnnnnnnnnnnnnnnnnnnnnnnnnnnnnnnnnnnnnnnnnnnnnnnnnnnnnnnnnnnnnnnnnnnnnnnnnnnnnnnnnnnnnnnnnnnnnnnnnnnnnnnnnnnnnnnnnnnnnnnnnnnnnnnnnnnnnnnnnnnnnnnnnnnnnnnnnnnnnnnnnnnnnnnnnnnnnnnnnnnnnnnnnnnnnnnnnnnnnnnnnnnnnnnnnnnnnnnnnnnnnnnnnnnnnnnnnnnnnnnnnnnnnnnnnnnnnnnnnnnnnnnnnnnnnnnnnnnnnnnnnnnnnnnnnnnnnnnnnnnnnnnnnnnnnnnnnnnnnnnnnnnnnnnnnnnnnnnnnnnnnnnnnnnnnnnnnnnnnnnnnnnnnnnnnnnnnnnnnnnnnnnnnnnnnnnnnnnnnnnnnnnnnnnnnnnnnnnnnnnnnnnnnnnnnnnnnnnnnnnnnnnnnnnnnnnnnnnnnnnnnnnnnnnnnnnnnnnnnnnnnnnnnnnnnnnnnnnnnnnnnnnnnnnnnnnnnnnnnnnnnnnnnnnnnnnnnnnnnnnnnnnnnnnnnnnnnnnnnnnnnnnnnnnnnnnnnnnnnnnnnnnnnnnnnnnnnnnnnnnnnnnnnnnnnnnnnnnnnnnnnnnnnnnnnnnnnnnnnnnnnnnnnnnnnnnnnnnnnnnnnnnnnnnnnnnnnnnnnnnnnnnnnnnnnnnnnnnnnnnnnnnnnnnnnnnnnnnnnnnnnnnnnnnnnnnnnnnnnnnnnnnnnnnnnnnnnnnnnnnnnnnnnnnnnnnnnnnnnnnnnnnnnnnnnnnnnnnnnnnnnnnnnnnnnnnnnnnnnnnnnnnnnnnnnnnnnnnnnnnnnnnnnnnnnnnnnnnnnnnnnnnnnnnnnnnnnnnnnnnnnnnnnnnnnnnnnnnnnnnnnnnnnnnnnnnnnnnnnnnnnnnnnnnnnnnnnnnnnnnnnnnnnnnnnnnnnnnnnnnnnnnnnnnnnnnnnnnnnnnnnnnnnnnnnnnnnnnnnnnnnnnnnnnnnnnnnnnnnnnnnnnnnnnnnnnnnnnnnnnnnnnnnnnnnnnnnnnnnnnnnnnnnnnnnnnnnnnnnnnnnnnnnnnnnnnnnnnnnnnnnnnnnnnnnnnnnnnnnnnnnnnnnnnnnnnnnnnnnnnnnnnnnnnnnnnnnnnnnnnnnnnnnnnnnnnnnnnnnnnnnnnnnnnnnnnnnnnnnnnnnnnnnnnnnnnnnnnnnnnnnnnnnnnnnnnnnnnnnnnnnnnnnnnnnnnnnnnnnnnnnnnnnnnnnnnnnnnnnnnnnnnnnnnnnnnnnnnnnnnnnnnnnnnnnnnnnnnnnnnnnnnnnnnnnnnnnnnnnnnnnnnnnnnnnnnnnnnnnnnnnnnnnnnnnnnnnnnnnnnnnnnnnnnnnnnnnnnnnnnnnnnnnnnnnnnnnnnnnnnnnnnnnnnnnnnnnnnnnnnnnnnnnnnnnnnnnnnnnnnnnnnnnnnnnnnnnnnnnnnnnnnnnnnnnnnnnnnnnnnnnnnnnnnnnnnnnnnnnnnnnnnnnnnnnnnnnnnnnnnnnnnnnnnnnnnnnnnnnnnnnnnnnnnnnnnnnnnnnnnnnnnnnnnnnnnnnnnnnnnnnnnnnnnnnnnnnnnnnnnnnnnnnnnnnnnnnnnnnnnnnnnnnnnnnnnnnnnnnnnnnnnnnnnnnnnnnnnnnnnnnnnnnnnnnnnnnnnnnnnnnnnnnnnnnnnnnnnnnnnnnnnnnnnnnnnnnnnnnnnnnnnnnnnnnnnnnnnnnnnnnnnnnnnnnnnnnnnnnnnnnnnnnnnnnnnnnnnnnnnnnnnnnnnnnnnnnnnnnnnnnnnnnnnnnnnnnnnnnnnnnnnnnnnnnnnnnnnnnnnnnnnnnnnnnnnnnnnnnnnnnnnnnnnnnnnnnnnnnnnnnnnnnnnnnnnnnnnnnnnnnnnnnnnnnnnnnnnnnnnnnnnnnnnnnnnnnnnnnnnnnnnnnnnnnnnnnnnnnnnnnnnnnnnnnnnnnnnnnnnnnnnnnnnnnnnnnnnnnnnnnnnnnnnnnnnnnnnnnnnnnnnnnnnnnnnnnnnnnnnnnnnnnnnnnnnnnnnnnnnnnnnnnnnnnnnnnnnnnnnnnnnnnnnnnnnnnnnnnnnnnnnnnnnnnnnnnnnnnnnnnnnnnnnnnnnnnnnnnnnnnnnnnnnnnnnnnnnnnnnnnnnnnnnnnnnnnnnnnnnnnnnnnnnnnnnnnnnnnnnnnnnnnnnnnnnnnnnnnnnnnnnnnnnnnnnnnnnnnnnnnnnnnnnnnnnnnnnnnnnnnnnnnnnnnnnnnnnnnnnnnnnnnnnnnnnnnnnnnnnnnnnnnnnnnnnnnnnnnnnnnnnnnnnnnnnnnnnnnnnnnnnnnnnnnnnnnnnnnnnnnnnnnnnnnnnnnnnnnnnnnnnnnnnnnnnnnnnnnnnnnnnnnnnnnnnnnnnnnnnnnnnnnnnnnnnnnnnnnnnnnnnnnnnnnnnnnnnnnnnnnnnnnnnnnnnnnnnnnnnnnnnnnnnnnnnnnnnnnnnnnnnnnnnnnnnnnnnnnnnnnnnnnnnnnnnnnnnnnnnnnnnnnnnnnnnnnnnnnnnnnnnnnnnnnnnnnnnnnnnnnnnnnnnnnnnnnnnnnnnnnnnnnnnnnnnnnnnnnnnnnnnnnnnnnnnnnnnnnnnnnnnnnnnnnnnnnnnnnnnnnnnnnnnnnnnnnnnnnnnnnnnnnnnnnnnnnnnnnnnnnnnnnnnnnnnnnnnnnnnnnnnnnnnnnnnnnnnnnnnnnnnnnnnnnnnnnnnnnnnnnnnnnnnnnnnnnnnnnnnnnnnnnnnnnnnnnnnnnnnnnnnnnnnnnnnnnnnnnnnnnnnnnnnnnnnnnnnnnnnnnnnnnnnnnnnnnnnnnnnnnnnnnnnnnnnnnnnnnnnnnnnnnnnnnnnnnnnnnnnnnnnnnnnnnnnnnnnnnnnnnnnnnnnnnnnnnnnnnnnnnnnnnnnnnnnnnnnnnnnnnnnnnnnnnnnnnnnnnnnnnnnnnnnnnnnnnnnnnnnnnnnnnnnnnnnnnnnnnnnnnnnnnnnnnnnnnnnnnnnnnnnnnnnnnnnnnnnnnnnnnnnnnnnnnnnnnnnnnnnnnnnnnnnnnnnnnnnnnnnnnnnnnnnnnnnnnnnnnnnnnnnnnnnnnnnnnnnnnnnnnnnnnnnnnnnnnnnnnnnnnnnnnnnnnnnnnnnnnnnnnnnnnnnnnnnnnnnnnnnnnnnnnnnnnnnnnnnnnnnnnnnnnnnnnnnnnnnnnnnnnnnnnnnnnnnnnnnnnnnnnnnnnnnnnnnnnnnnnnnnnnnnnnnnnnnnnnnnnnnnnnnnnnnnnnnnnnnnnnnnnnnnnnnnnnnnnnnnnnnnnnnnnnnnnnnnnnnnnnnnnnnnnnnnnnnnnnnnnnnnnnnnnnnnnnnnnnnnnnnnnnnnnnnnnnnnnnnnnnnnnnnnnnnnnnnnnnnnnnnnnnnnnnnnnnnnnnnnnnnnnnnnnnnnnnnnnnnnnnnnnnnnnnnnnnnnnnnnnnnnnnnnnnnnnnnnnnnnnnnnnnnnnnnnnnnnnnnnnnnnnnnnnnnnnnnnnnnnnnnnnnnnnnnnnnnnnnnnnnnnnnnnnnnnnnnnnnnnnnnnnnnnnnnnnnnnnnnnnnnnnnnnnnnnnnnnnnnnnnnnnnnnnnnnnnnnnnnnnnnnnnnnnnnnnnnnnnnnnnnnnnnnnnnnnnnnnnnnnnnnnnnnnnnnnnnnnnnnnnnnnnnnnnnnnnnnnnnnnnnnnnnnnnnnnnnnnnnnnnnnnnnnnnnnnnnnnnnnnnnnnnnnnnnnnnnnnnnnnnnnnnnnnnnnnnnnnnnnnnnnnnnnnnnnnnnnnnnnnnnnnnnnnnnnnnnnnnnnnnnnnnnnnnnnnnnnnnnnnnnnnnnnnnnnnnnnnnnnnnnnnnnnnnnnnnnnnnnnnnnnnnnnnnnnnnnnnnnnnnnnnnnnnnnnnnnnnnnnnnnnnnnnnnnnnnnnnnnnnnnnnnnnnnnnnnnnnnnnnnnnnnnnnnnnnnnnnnnnnnnnnnnnnnnnnnnnnnnnnnnnnnnnnnnnnnnnnnnnnnnnnnnnnnnnnnnnnnnnnnnnnnnnnnnnnnnnnnnnnnnnnnnnnnnnnnnnnnnnnnnnnnnnnnnnnnnnnnnnnnnnnnnnnnnnnnnnnnnnnnnnnnnnnnnnnnnnnnnnnnnnnnnnnnnnnnnnnnnnnnnnnnnnnnnnnnnnnnnnnnnnnnnnnnnnnnnnnnnnnnnnnnnnnnnnnnnnnnnnnnnnnnnnnnnnnnnnnnnnnnnnnnnnnnnnnnnnnnnnnnnnnnnnnnnnnnnnnnnnnnnnnnnnnnnnnnnnnnnnnnnnnnnnnnnnnnnnnnnnnnnnnnnnnnnnnnnnnnnnnnnnnnnnnnnnnnnnnnnnnnnnnnnnnnnnnnnnnnnnnnnnnnnnnnnnnnnnnnnnnnnnnnnnnnnnnnnnnnnnnnnnnnnnnnnnnnnnnnnnnnnnnnnnnnnnnnnnnnnnnnnnnnnnnnnnnnnnnnnnnnnnnnnnnnnnnnnnnnnnnnnnnnnnnnnnnnnnnnnnnnnnnnnnnnnnnnnnnnnnnnnnnnnnnnnnnnnnnnnnnnnnnnnnnnnnnnnnnnnnnnnnnnnnnnnnnnnnnnnnnnnnnnnnnnnnnnnnnnnnnnnnnnnnnnnnnnnnnnnnnnnnnnnnnnnnnnnnnnnnnnnnnnnnnnnnnnnnnnnnnnnnnnnnnnnnnnnnnnnnnnnnnnnnnnnnnnnnnnnnnnnnnnnnnnnnnnnnnnnnnnnnnnnnnnnnnnnnnnnnnnnnnnnnnnnnnnnnnnnnnnnnnnnnnnnnnnnnnnnnnnnnnnnnnnnnnnnnnnnnnnnnnnnnnnnnnnnnnnnnnnnnnnnnnnnnnnnnnnnnnnnnnnnnnnnnnnnnnnnnnnnnnnnnnnnnnnnnnnnnnnnnnnnnnnnnnnnnnnnnnnnnnnnnnnnnnnnnnnnnnnnnnnnnnnnnnnnnnnnnnnnnnnnnnnnnnnnnnnnnnnnnnnnnnnnnnnnnnnnnnnnnnnnnnnnnnnnnnnnnnnnnnnnnnnnnnnnnnnnnnnnnnnnnnnnnnnnnnnnnnnnnnnnnnnnnnnnnnnnnnnnnnnnnnnnnnnnnnnnnnnnnnnnnnnnnnnnnnnnnnnnnnnnnnnnnnnnnnnnnnnnnnnnnnnnnnnnnnnnnnnnnnnnnnnnnnnnnnnnnnnnnnnnnnnnnnnnnnnnnnnnnnnnnnnnnnnnnnnnnnnnnnnnnnnnnnnnnnnnnnnnnnnnnnnnnnnnnnnnnnnnnnnnnnnnnnnnnnnnnnnnnnnnnnnnnnnnnnnnnnnnnnnnnnnnnnnnnnnnnnnnnnnnnnnnnnnnnnnnnnnnnnnnnnnnnnnnnnnnnnnnnnnnnnnnnnnnnnnnnnnnnnnnnnnnnnnnnnnnnnnnnnnnnnnnnnnnnnnnnnnnnnnnnnnnnnnnnnnnnnnnnnnnnnnnnnnnnnnnnnnnnnnnnnnnnnnnnnnnnnnnnnnnnnnnnnnnnnnnnnnnnnnnnnnnnnnnnnnnnnnnnnnnnnnnnnnnnnnnnnnnnnnnnnnnnnnnnnnnnnnnnnnnnnnnnnnnnnnnnnnnnnnnnnnnnnnnnnnnnnnnnnnnnnnnnnnnnnnnnnnnnnnnnnnnnnnnnnnnnnnnnnnnnnnnnnnnnnnnnnnnnnnnnnnnnnnnnnnnnnnnnnnnnnnnnnnnnnnnnnnnnnnnnnnnnnnnnnnnnnnnnnnnnnnnnnnnnnnnnnnnnnnnnnnnnnnnnnnnnnnnnnnnnnnnnnnnnnnnnnnnnnnnnnnnnnnnnnnnnnnnnnnnnnnnnnnnnnnnnnnnnnnnnnnnnnnnnnnnnnnnnnnnnnnnnnnnnnnnnnnnnnnnnnnnnnnnnnnnnnnnnnnnnnnnnnnnnnnnnnnnnnnnnnnnnnnnnnnnnnnnnnnnnnnnnnnnnnnnnnnnnnnnnnnnnnnnnnnnnnnnnnnnnnnnnnnnnnnnnnnnnnnnnnnnnnnnnnnnnnnnnnnnnnnnnnnnnnnnnnnnnnnnnnnnnnnnnnnnnnnnnnnnnnnnnnnnnnnnnnnnnnnnnnnnnnnnnnnnnnnnnnnnnnnnnnnnnnnnnnnnnnnnnnnnnnnnnnnnnnnnnnnnnnnnnnnnnnnnnnnnnnnnnnnnnnnnnnnnnnnnnnnnnnnnnnnnnnnnnnnnnnnnnnnnnnnnnnnnnnnnnnnnnnnnnnnnnnnnnnnnnnnnnnnnnnnnnnnnnnnnnnnnnnnnnnnnnnnnnnnnnnnnnnnnnnnnnnnnnnnnnnnnnnnnnnnnnnnnnnnnnnnnnnnnnnnnnnnnnnnnnnnnnnnnnnnnnnnnnnnnnnnnnnnnnnnnnnnnnnnnnnnnnnnnnnnnnnnnnnnnnnnnnnnnnnnnnnnnnnnnnnnnnnnnnnnnnnnnnnnnnnnnnnnnnnnnnnnnnnnnnnnnnnnnnnnnnnnnnnnnnnnnnnnnnnnnnnnnnnnnnnnnnnnnnnnnnnnnnnnnnnnnnnnnnnnnnnnnnnnnnnnnnnnnnnnnnnnnnnnnnnnnnnnnnnnnnnnnnnnnnnnnnnnnnnnnnnnnnnnnnnnnnnnnnnnnnnnnnnnnnnnnnnnnnnnnnnnnnnnnnnnnnnnnnnnnnnnnnnnnnnnnnnnnnnnnnnnnnnnnnnnnnnnnnnnnnnnnnnnnnnnnnnnnnnnnnnnnnnnnnnnnnnnnnnnnnnnnnnnnnnnnnnnnnnnnnnnnnnnnnnnnnnnnnnnnnnnnnnnnnnnnnnnnnnnnnnnnnnnnnnnnnnnnnnnnnnnnnnnnnnnnnnnnnnnnnnnnnnnnnnnnnnnnnnnnnnnnnnnnnnnnnnnnnnnnnnnnnnnnnnnnnnnnnnnnnnnnnnnnnnnnnnnnnnnnnnnnnnnnnnnnnnnnnnnnnnnnnnnnnnnnnnnnnnnnnnnnnnnnnnnnnnnnnnnnnnnnnnnnnnnnnnnnnnnnnnnnnnnnnnnnnnnnnnnnnnnnnnnnnnnnnnnnnnnnnnnnnnnnnnnnnnnnnnnnnnnnnnnnnnnnnnnnnnnnnnnnnnnnnnnnnnnnnnnnnnnnnnnnnnnnnnnnnnnnnnnnnnnnnnnnnnnnnnnnnnnnnnnnnnnnnnnnnnnnnnnnnnnnnnnnnnnnnnnnnnnnnnnnnnnnnnnnnnnnnnnnnnnnnnnnnnnnnnnnnnnnnnnnnnnnnnnnnnnnnnnnnnnnnnnnnnnnnnnnnnnnnnnnnnnnnnnnnnnnnnnnnnnnnnnnnnnnnnnnnnnnnnnnnnnnnnnnnnnnnnnnnnnnnnnnnnnnnnnnnnnnnnnnnnnnnnnnnnnnnnnnnnnnnnnnnnnnnnnnnnnnnnnnnnnnnnnnnnnnnnnnnnnnnnnnnnnnnnnnnnnnnnnnnnnnnnnnnnnnnnnnnnnnnnnnnnnnnnnnnnnnnnnnnnnnnnnnnnnnnnnnnnnnnnnnnnnnnnnnnnnnnnnnnnnnnnnnnnnnnnnnnnnnnnnnnnnnnnnnnnnnnnnnnnnnnnnnnnnnnnnnnnnnnnnnnnnnnnnnnnnnnnnnnnnnnnnnnnnnnnnnnnnnnnnnnnnnnnnnnnnnnnnnnnnnnnnnnnnnnnnnnnnnnnnnnnnnnnnnnnnnnnnnnnnnnnnnnnnnnnnnnnnnnnnnnnnnnnnnnnnnnnnnnnnnnnnnnnnnnnnnnnnnnnnnnnnnnnnnnnnnnnnnnnnnnnnnnnnnnnnnnnnnnnnnnnnnnnnnnnnnnnnnnnnnnnnnnnnnnnnnnnnnnnnnnnnnnnnnnnnnnnnnnnnnnnnnnnnnnnnnnnnnnnnnnnnnnnnnnnnnnnnnnnnnnnnnnnnnnnnnnnnnnnnnnnnnnnnnnnnnnnnnnnnnnnnnnnnnnnnnnnnnnnnnnnnnnnnnnnnnnnnnnnnnnnnnnnnnnnnnnnnnnnnnnnnnnnnnnnnnnnnnnnnnnnnnnnnnnnnnnnnnnnnnnnnnnnnnnnnnnnnnnnnnnnnnnnnnnnnnnnnnnnnnnnnnnnnnnnnnnnnnnnnnnnnnnnnnnnnnnnnnnnnnnnnnnnnnnnnnnnnnnnnnnnnnnnnnnnnnnnnnnnnnnnnnnnnnnnnnnnnnnnnnnnnnnnnnnnnnnnnnnnnnnnnnnnnnnnnnnnnnnnnnnnnnnnnnnnnnnnnnnnnnnnnnnnnnnnnnnnnnnnnnnnnnnnnnnnnnnnnnnnnnnnnnnnnnnnnnnnnnnnnnnnnnnnnnnnnnnnnnnnnnnnnnnnnnnnnnnnnnnnnnnnnnnnnnnnnnnnnnnnnnnnnnnnnnnnnnnnnnnnnnnnnnnnnnnnnnnnnnnnnnnnnnnnnnnnnnnnnnnnnnnnnnnnnnnnnnnnnnnnnnnnnnnnnnnnnnnnnnnnnnnnnnnnnnnnnnnnnnnnnnnnnnnnnnnnnnnnnnnnnnnnnnnnnnnnnnnnnnnnnnnnnnnnnnnnnnnnnnnnnnnnnnnnnnnnnnnnnnnnnnnnnnnnnnnnnnnnnnnnnnnnnnnnnnnnnnnnnnnnnnnnnnnnnnnnnnnnnnnnnnnnnnnnnnnnnnnnnnnnnnnnnnnnnnnnnnnnnnnnnnnnnnnnnnnnnnnnnnnnnnnnnnnnnnnnnnnnnnnnnnnnnnnnnnnnnnnnnnnnnnnnnnnnnnnnnnnnnnnnnnnnnnnnnnnnnnnnnnnnnnnnnnnnnnnnnnnnnnnnnnnnnnnnnnnnnnnnnnnnnnnnnnnnnnnnnnnnnnnnnnnnnnnnnnnnnnnnnnnnnnnnnnnnnnnnnnnnnnnnnnnnnnnnnnnnnnnnnnnnnnnnnnnnnnnnnnnnnnnnnnnnnnnnnnnnnnnnnnnnnnnnnnnnnnnnnnnnnnnnnnnnnnnnnnnnnnnnnnnnnnnnnnnnnnnnnnnnnnnnnnnnnnnnnnnnnnnnnnnnnnnnnnnnnnnnnnnnnnnnnnnnnnnnnnnnnnnnnnnnnnnnnnnnnnnnnnnnnnnnnnnnnnnnnnnnnnnnnnnnnnnnnnnnnnnnnnnnnnnnnnnnnnnnnnnnnnnnnnnnnnnnnnnnnnnnnnnnnnnnnnnnnnnnnnnnnnnnnnnnnnnnnnnnnnnnnnnnnnnnnnnnnnnnnnnnnnnnnnnnnnnnnnnnnnnnnnnnnnnnnnnnnnnnnnnnnnnnnnnnnnnnnnnnnnnnnnnnnnnnnnnnnnnnnnnnnnnnnnnnnnnnnnnnnnnnnnnnnnnnnnnnnnnnnnnnnnnnnnnnnnnnnnnnnnnnnnnnnnnnnnnnnnnnnnnnnnnnnnnnnnnnnnnnnnnnnnnnnnnnnnnnnnnnnnnnnnnnnnnnnnnnnnnnnnnnnnnnnnnnnnnnnnnnnnnnnnnnnnnnnnnnnnnnnnnnnnnnnnnnnnnnnnnnnnnnnnnnnnnnnnnnnnnnnnnnnnnnnnnnnnnnnnnnnnnnnnnnnnnnnnnnnnnnnnnnnnnnnnnnnnnnnnnnnnnnnnnnnnnnnnnnnnnnnnnnnnnnnnnnnnnnnnnnnnnnnnnnnnnnnnnnnnnnnnnnnnnnnnnnnnnnnnnnnnnnnnnnnnnnnnnnnnnnnnnnnnnnnnnnnnnnnnnnnnnnnnnnnnnnnnnnnnnnnnnnnnnnnnnnnnnnnnnnnnnnnnnnnnnnnnnnnnnnnnnnnnnnnnnnnnnnnnnnnnnnnnnnnnnnnnnnnnnnnnnnnnnnnnnnnnnnnnnnnnnnnnnnnnnnnnnnnnnnnnnnnnnnnnnnnnnnnnnnnnnnnnnnnnnnnnnnnnnnnnnnnnnnnnnnnnnnnnnnnnnnnnnnnnnnnnnnnnnnnnnnnnnnnnnnnnnnnnnnnnnnnnnnnnnnnnnnnnnnnnnnnnnnnnnnnnnnnnnnnnnnnnnnnnnnnnnnnnnnnnnnnnnnnnnnnnnnnnnnnnnnnnnnnnnnnnnnnnnnnnnnnnnnnnnnnnnnnnnnnnnnnnnnnnnnnnnnnnnnnnnnnnnnnnnnnnnnnnnnnnnnnnnnnnnnnnnnnnnnnnnnnnnnnnnnnnnnnnnnnnnnnnnnnnnnnnnnnnnnnnnnnnnnnnnnnnnnnnnnnnnnnnnnnnnnnnnnnnnnnnnnnnnnnnnnnnnnnnnnnnnnnnnnnnnnnnnnnnnnnnnnnnnnnnnnnnnnnnnnnnnnnnnnnnnnnnnnnnnnnnnnnnnnnnnnnnnnnnnnnnnnnnnnnnnnnnnnnnnnnnnnnnnnnnnnnnnnnnnnnnnnnnnnnnnnnnnnnnnnnnnnnnnnnnnnnnnnnnnnnnnnnnnnnnnnnnnnnnnnnnnnnnnnnnnnnnnnnnnnnnnnnnnnnnnnnnnnnnnnnnnnnnnnnnnnnnnnnnnnnnnnnnnnnnnnnnnnnnnnnnnnnnnnnnnnnnnnnnnnnnnnnnnnnnnnnnnnnnnnnnnnnnnnnnnnnnnnnnnnnnnnnnnnnnnnnnnnnnnnnnnnnnnnnnnnnnnnnnnnnnnnnnnnnnnnnnnnnnnnnnnnnnnnnnnnnnnnnnnnnnnnnnnnnnnnnnnnnnnnnnnnnnnnnnnnnnnnnnnnnnnnnnnnnnnnnnnnnnnnnnnnnnnnnnnnnnnnnnnnnnnnnnnnnnnnnnnnnnnnnnnnnnnnnnnnnnnnnnnnnnnnnnnnnnnnnnnnnnnnnnnnnnnnnnnnnnnnnnnnnnnnnnnnnnnnnnnnnnnnnnnnnnnnnnnnnnnnnnnnnnnnnnnnnnnnnnnnnnnnnnnnnnnnnnnnnnnnnnnnnnnnnnnnnnnnnnnnnnnnnnnnnnnnnnnnnnnnnnnnnnnnnnnnnnnnnnnnnnnnnnnnnnnnnnnnnnnnnnnnnnnnnnnnnnnnnnnnnnnnnnnnnnnnnnnnnnnnnnnnnnnnnnnnnnnnnnnnnnnnnnnnnnnnnnnnnnnnnnnnnnnnnnnnnnnnnnnnnnnnnnnnnnnnnnnnnnnnnnnnnnnnnnnnnnnnnnnnnnnnnnnnnnnnnnnnnnnnnnnnnnnnnnnnnnnnnnnnnnnnnnnnnnnnnnnnnnnnnnnnnnnnnnnnnnnnnnnnnnnnnnnnnnnnnnnnnnnnnnnnnnnnnnnnnnnnnnnnnnnnnnnnnnnnnnnnnnnnnnnnnnnnnnnnnnnnnnnnnnnnnnnnnnnnnnnnnnnnnnnnnnnnnnnnnnnnnnnnnnnnnnnnnnnnnnnnnnnnnnnnnnnnnnnnnnnnnnnnnnnnnnnnnnnnnnnnnnnnnnnnnnnnnnnnnnnnnnnnnnnnnnnnnnnnnnnnnnnnnnnnnnnnnnnnnnnnnnnnnnnnnnnnnnnnnnnnnnnnnnnnnnnnnnnnnnnnnnnnnnnnnnnnnnnnnnnnnnnnnnnnnnnnnnnnnnnnnnnnnnnnnnnnnnnnnnnnnnnnnnnnnnnnnnnnnnnnnnnnnnnnnnnnnnnnnnnnnnnnnnnnnnnnnnnnnnnnnnnnnnnnnnnnnnnnnnnnnnnnnnnnnnnnnnnnnnnnnnnnnnnnnnnnnnnnnnnnnnnnnnnnnnnnnnnnnnnnnnnnnnnnnnnnnnnnnnnnnnnnnnnnnnnnnnnnnnnnnnnnnnnnnnnnnnnnnnnnnnnnnnnnnnnnnnnnnnnnnnnnnnnnnnnnnnnnnnnnnnnnnnnnnnnnnnnnnnnnnnnnnnnnnnnnnnnnnnnnnnnnnnnnnnnnnnnnnnnnnnnnnnnnnnnnnnnnnnnnnnnnnnnnnnnnnnnnnnnnnnnnnnnnnnnnnnnnnnnnnnnnnnnnnnnnnnnnnnnnnnnnnnnnnnnnnnnnnnnnnnnnnnnnnnnnnnnnnnnnnnnnnnnnnnnnnnnnnnnnnnnnnnnnnnnnnnnnnnnnnnnnnnnnnnnnnnnnnnnnnnnnnnnnnnnnnnnnnnnnnnnnnnnnnnnnnnnnnnnnnnnnnnnnnnnnnnnnnnnnnnnnnnnnnnnnnnnnnnnnnnnnnnnnnnnnnnnnnnnnnnnnnnnnnnnnnnnnnnnnnnnnnnnnnnnnnnnnnnnnnnnnnnnnnnnnnnnnnnnnnnnnnnnnnnnnnnnnnnnnnnnnnnnnnnnnnnnnnnnnnnnnnnnnnnnnnnnnnnnnnnnnnnnnnnnnnnnnnnnnnnnnnnnnnnnnnnnnnnnnnnnnnnnnnnnnnnnnnnnnnnnnnnnnnnnnnnnnnnnnnnnnnnnnnnnnnnnnnnnnnnnnnnnnnnnnnnnnnnnnnnnnnnnnnnnnnnnnnnnnnnnnnnnnnnnnnnnnnnnnnnnnnnnnnnnnnnnnnnnnnnnnnnnnnnnnnnnnnnnnnnnnnnnnnnnnnnnnnnnnnnnnnnnnnnnnnnnnnnnnnnnnnnnnnnnnnnnnnnnnnnnnnnnnnnnnnnnnnnnnnnnnnnnnnnnnnnnnnnnnnnnnnnnnnnnnnnnnnnnnnnnnnnnnnnnnnnnnnnnnnnnnnnnnnnnnnnnnnnnnnnnnnnnnnnnnnnnnnnnnnnnnnnnnnnnnnnnnnnnnnnnnnnnnnnnnnnnnnnnnnnnnnnnnnnnnnnnnnnnnnnnnnnnnnnnnnnnnnnnnnnnnnnnnnnnnnnnnnnnnnnnnnnnnnnnnnnnnnnnnnnnnnnnnnnnnnnnnnnnnnnnnnnnnnnnnnnnnnnnnnnnnnnnnnnnnnnnnnnnnnnnnnnnnnnnnnnnnnnnnnnnnnnnnnnnnnnnnnnnnnnnnnnnnnnnnnnnnnnnnnnnnnnnnnnnnnnnnnnnnnnnnnnnnnnnnnnnnnnnnnnnnnnnnnnnnnnnnnnnnnnnnnnnnnnnnnnnnnnnnnnnnnnnnnnnnnnnnnnnnnnnnnnnnnnnnnnnnnnnnnnnnnnnnnnnnnnnnnnnnnnnnnnnnnnnnnnnnnnnnnnnnnnnnnnnnnnnnnnnnnnnnnnnnnnnnnnnnnnnnnnnnnnnnnnnnnnnnnnnnnnnnnnnnnnnnnnnnnnnnnnnnnnnnnnnnnnnnnnnnnnnnnnnnnnnnnnnnnnnnnnnnnnnnnnnnnnnnnnnnnnnnnnnnnnnnnnnnnnnnnnnnnnnnnnnnnnnnnnnnnnnnnnnnnnnnnnnnnnnnnnnnnnnnnnnnnnnnnnnnnnnnnnnnnnnnnnnnnnnnnnnnnnnnnnnnnnnnnnnnnnnnnnnnnnnnnnnnnnnnnnnnnnnnnnnnnnnnnnnnnnnnnnnnnnnnnnnnnnnnnnnnnnnnnnnnnnnnnnnnnnnnnnnnnnnnnnnnnnnnnnnnnnnnnnnnnnnnnnnnnnnnnnnnnnnnnnnnnnnnnnnnnnnnnnnnnnnnnnnnnnnnnnnnnnnnnnnnnnnnnnnnnnnnnnnnnnnnnnnnnnnnnnnnnnnnnnnnnnnnnnnnnnnnnnnnnnnnnnnnnnnnnnnnnnnnnnnnnnnnnnnnnnnnnnnnnnnnnnnnnnnnnnnnnnnnnnnnnnnnnnnnnnnnnnnnnnnnnnnnnnnnnnnnnnnnnnnnnnnnnnnnnnnnnnnnnnnnnnnnnnnnnnnnnnnnnnnnnnnnnnnnnnnnnnnnnnnnnnnnnnnnnnnnnnnnnnnnnnnnnnnnnnnnnnnnnnnnnnnnnnnnnnnnnnnnnnnnnnnnnnnnnnnnnnnnnnnnnnnnnnnnnnnnnnnnnnnnnnnnnnnnnnnnnnnnnnnnnnnnnnnnnnnnnnnnnnnnnnnnnnnnnnnnnnnnnnnnnnnnnnnnnnnnnnnnnnnnnnnnnnnnnnnnnnnnnnnnnnnnnnnnnnnnnnnnnnnnnnnnnnnnnnnnnnnnnnnnnnnnnnnnnnnnnnnnnnnnnnnnnnnnnnnnnnnnnnnnnnnnnnnnnnnnnnnnnnnnnnnnnnnnnnnnnnnnnnnnnnnnnnnnnnnnnnnnnnnnnnnnnnnnnnnnnnnnnnnnnnnnnnnnnnnnnnnnnnnnnnnnnnnnnnnnnnnnnnnnnnnnnnnnnnnnnnnnnnnnnnnnnnnnnnnnnnnnnnnnnnnnnnnnnnnnnnnnnnnnnnnnnnnnnnnnnnnnnnnnnnnnnnnnnnnnnnnnnnnnnnnnnnnnnnnnnnnnnnnnnnnnnnnnnnnnnnnnnnnnnnnnnnnnnnnnnnnnnnnnnnnnnnnnnnnnnnnnnnnnnnnnnnnnnnnnnnnnnnnnnnnnnnnnnnnnnnnnnnnnnnnnnnnnnnnnnnnnnnnnnnnnnnnnnnnnnnnnnnnnnnnnnnnnnnnnnnnnnnnnnnnnnnnnnnnnnnnnnnnnnnnnnnnnnnnnnnnnnnnnnnnnnnnnnnnnnnnnnnnnnnnnnnnnnnnnnnnnnnnnnnnnnnnnnnnnnnnnnnnnnnnnnnnnnnnnnnnnnnnnnnnnnnnnnnnnnnnnnnnnnnnnnnnnnnnnnnnnnnnnnnnnnnnnnnnnnnnnnnnnnnnnnnnnnnnnnnnnnnnnnnnnnnnnnnnnnnnnnnnnnnnnnnnnnnnnnnnnnnnnnnnnnnnnnnnnnnnnnnnnnnnnnnnnnnnnnnnnnnnnnnnnnnnnnnnnnnnnnnnnnnnnnnnnnnnnnnnnnnnnnnnnnnnnnnnnnnnnnnnnnnnnnnnnnnnnnnnnnnnnnnnnnnnnnnnnnnnnnnnnnnnnnnnnnnnnnnnnnnnnnnnnnnnnnnnnnnnnnnnnnnnnnnnnnnnnnnnnnnnnnnnnnnnnnnnnnnnnnnnnnnnnnnnnnnnnnnnnnnnnnnnnnnnnnnnnnnnnnnnnnnnnnnnnnnnnnnnnnnnnnnnnnnnnnnnnnnnnnnnnnnnnnnnnnnnnnnnnnnnnnnnnnnnnnnnnnnnnnnnnnnnnnnnnnnnnnnnnnnnnnnnnnnnnnnnnnnnnnnnnnnnnnnnnnnnnnnnnnnnnnnnnnnnnnnnnnnnnnnnnnnnnnnnnnnnnnnnnnnnnnnnnnnnnnnnnnnnnnnnnnnnnnnnnnnnnnnnnnnnnnnnnnnnnnnnnnnnnnnnnnnnnnnnnnnnnnnnnnnnnnnnnnnnnnnnnnnnnnnnnnnnnnnnnnnnnnnnnnnnnnnnnnnnnnnnnnnnnnnnnnnnnnnnnnnnnnnnnnnnnnnnnnnnnnnnnnnnnnnnnnnnnnnnnnnnnnnnnnnnnnnnnnnnnnnnnnnnnnnnnnnnnnnnnnnnnnnnnnnnnnnnnnnnnnnnnnnnnnnnnnnnnnnnnnnnnnnnnnnnnnnnnnnnnnnnnnnnnnnnnnnnnnnnnnnnnnnnnnnnnnnnnnnnnnnnnnnnnnnnnnnnnnnnnnnnnnnnnnnnnnnnnnnnnnnnnnnnnnnnnnnnnnnnnnnnnnnnnnnnnnnnnnnnnnnnnnnnnnnnnnnnnnnnnnnnnnnnnnnnnnnnnnnnnnnnnnnnnnnnnnnnnnnnnnnnnnnnnnnnnnnnnnnnnnnnnnnnnnnnnnnnnnnnnnnnnnnnnnnnnnnnnnnnnnnnnnnnnnnnnnnnnnnnnnnnnnnnnnnnnnnnnnnnnnnnnnnnnnnnnnnnnnnnnnnnnnnnnnnnnnnnnnnnnnnnnnnnnnnnnnnnnnnnnnnnnnnnnnnnnnnnnnnnnnnnnnnnnnnnnnnnnnnnnnnnnnnnnnnnnnnnnnnnnnnnnnnnnnnnnnnnnnnnnnnnnnnnnnnnnnnnnnnnnnnnnnnnnnnnnnnnnnnnnnnnnnnnnnnnnnnnnnnnnnnnnnnnnnnnnnnnnnnnnnnnnnnnnnnnnnnnnnnnnnnnnnnnnnnnnnnnnnnnnnnnnnnnnnnnnnnnnnnnnnnnnnnnnnnnnnnnnnnnnnnnnnnnnnnnnnnnnnnnnnnnnnnnnnnnnnnnnnnnnnnnnnnnnnnnnnnnnnnnnnnnnnnnnnnnnnnnnnnnnnnnnnnnnnnnnnnnnnnnnnnnnnnnnnnnnnnnnnnnnnnnnnnnnnnnnnnnnnnnnnnnnnnnnnnnnnnnnnnnnnnnnnnnnnnnnnnnnnnnnnnnnnnnnnnnnnnnnnnnnnnnnnnnnnnnnnnnnnnnnnnnnnnnnnnnnnnnnnnnnnnnnnnnnnnnnnnnnnnnnnnnnnnnnnnnnnnnnnnnnnnnnnnnnnnnnnnnnnnnnnnnnnnnnnnnnnnnnnnnnnnnnnnnnnnnnnnnnnnnnnnnnnnnnnnnnnnnnnnnnnnnnnnnnnnnnnnnnnnnnnnnnnnnnnnnnnnnnnnnnnnnnnnnnnnnnnnnnnnnnnnnnnnnnnnnnnnnnnnnnnnnnnnnnnnnnnnnnnnnnnnnnnnnnnnnnnnnnnnnnnnnnnnnnnnnnnnnnnnnnnnnnnnnnnnnnnnnnnnnnnnnnnnnnnnnnnnnnnnnnnnnnnnnnnnnnnnnnnnnnnnnnnnnnnnnnnnnnnnnnnnnnnnnnnnnnnnnnnnnnnnnnnnnnnnnnnnnnnnnnnnnnnnnnnnnnnnnnnnnnnnnnnnnnnnnnnnnnnnnnnnnnnnnnnnnnnnnnnnnnnnnnnnnnnnnnnnnnnnnnnnnnnnnnnnnnnnnnnnnnnnnnnnnnnnnnnnnnnnnnnnnnnnnnnnnnnnnnnnnnnnnnnnnnnnnnnnnnnnnnnnnnnnnnnnnnnnnnnnnnnnnnnnnnnnnnnnnnnnnnnnnnnnnnnnnnnnnnnnnnnnnnnnnnnnnnnnnnnnnnnnnnnnnnnnnnnnnnnnnnnnnnnnnnnnnnnnnnnnnnnnnnnnnnnnnnnnnnnnnnnnnnnnnnnnnnnnnnnnnnnnnnnnnnnnnnnnnnnnnnnnnnnnnnnnnnnnnnnnnnnnnnnnnnnnnnnnnnnnnnnnnnnnnnnnnnnnnnnnnnnnnnnnnnnnnnnnnnnnnnnnnnnnnnnnnnnnnnnnnnnnnnnnnnnnnnnnnnnnnnnnnnnnnnnnnnnnnnnnnnnnnnnnnnnnnnnnnnnnnnnnnnnnnnnnnnnnnnnnnnnnnnnnnnnnnnnnnnnnnnnnnnnnnnnnnnnnnnnnnnnnnnnnnnnnnnnnnnnnnnnnnnnnnnnnnnnnnnnnnnnnnnnnnnnnnnnnnnnnnnnnnnnnnnnnnnnnnnnnnnnnnnnnnnnnnnnnnnnnnnnnnnnnnnnnnnnnnnnnnnnnnnnnnnnnnnnnnnnnnnnnnnnnnnnnnnnnnnnnnnnnnnnnnnnnnnnnnnnnnnnnnnnnnnnnnnnnnnnnnnnnnnnnnnnnnnnnnnnnnnnnnnnnnnnnnnnnnnnnnnnnnnnnnnnnnnnnnnnnnnnnnnnnnnnnnnnnnnnnnnnnnnnnnnnnnnnnnnnnnnnnnnnnnnnnnnnnnnnnnnnnnnnnnnnnnnnnnnnnnnnnnnnnnnnnnnnnnnnnnnnnnnnnnnnnnnnnnnnnnnnnnnnnnnnnnnnnnnnnnnnnnnnnnnnnnnnnnnnnnnnnnnnnnnnnnnnnnnnnnnnnnnnnnnnnnnnnnnnnnnnnnnnnnnnnnnnnnnnnnnnnnnnnnnnnnnnnnnnnnnnnnnnnnnnnnnnnnnnnnnnnnnnnnnnnnnnnnnnnnnnnnnnnnnnnnnnnnnnnnnnnnnnnnnnnnnnnnnnnnnnnnnnnnnnnnnnnnnnnnnnnnnnnnnnnnnnnnnnnnnnnnnnnnnnnnnnnnnnnnnnnnnnnnnnnnnnnnnnnnnnnnnnnnnnnnnnnnnnnnnnnnnnnnnnnnnnnnnnnnnnnnnnnnnnnnnnnnnnnnnnnnnnnnnnnnnnnnnnnnnnnnnnnnnnnnnnnnnnnnnnnnnnnnnnnnnnnnnnnnnnnnnnnnnnnnnnnnnnnnnnnnnnnnnnnnnnnnnnnnnnnnnnnnnnnnnnnnnnnnnnnnnnnnnnnnnnnnnnnnnnnnnnnnnnnnnnnnnnnnnnnnnnnnnnnnnnnnnnnnnnnnnnnnnnnnnnnnnnnnnnnnnnnnnnnnnnnnnnnnnnnnnnnnnnnnnnnnnnnnnnnnnnnnnnnnnnnnnnnnnnnnnnnnnnnnnnnnnnnnnnnnnnnnnnnnnnnnnnnnnnnnnnnnnnnnnnnnnnnnnnnnnnnnnnnnnnnnnnnnnnnnnnnnnnnnnnnnnnnnnnnnnnnnnnnnnnnnnnnnnnnnnnnnnnnnnnnnnnnnnnnnnnnnnnnnnnnnnnnnnnnnnnnnnnnnnnnnnnnnnnnnnnnnnnnnnnnnnnnnnnnnnnnnnnnnnnnnnnnnnnnnnnnnnnnnnnnnnnnnnnnnnnnnnnnnnnnnnnnnnnnnnnnnnnnnnnnnnnnnnnnnnnnnnnnnnnnnnnnnnnnnnnnnnnnnnnnnnnnnnnnnnnnnnnnnnnnnnnnnnnnnnnnnnnnnnnnnnnnnnnnnnnnnnnnnnnnnnnnnnnnnnnnnnnnnnnnnnnnnnnnnnnnnnnnnnnnnnnnnnnnnnnnnnnnnnnnnnnnnnnnnnnnnnnnnnnnnnnnnnnnnnnnnnnnnnnnnnnnnnnnnnnnnnnnnnnnnnnnnnnnnnnnnnnnnnnnnnnnnnnnnnnnnnnnnnnnnnnnnnnnnnnnnnnnnnnnnnnnnnnnnnnnnnnnnnnnnnnnnnnnnnnnnnnnnnnnnnnnnnnnnnnnnnnnnnnnnnnnnnnnnnnnnnnnnnnnnnnnnnnnnnnnnnnnnnnnnnnnnnnnnnnnnnnnnnnnnnnnnnnnnnnnnnnnnnnnnnnnnnnnnnnnnnnnnnnnnnnnnnnnnnnnnnnnnnnnnnnnnnnnnnnnnnnnnnnnnnnnnnnnnnnnnnnnnnnnnnnnnnnnnnnnnnnnnnnnnnnnnnnnnnnnnnnnnnnnnnnnnnnnnnnnnnnnnnnnnnnnnnnnnnnnnnnnnnnnnnnnnnnnnnnnnnnnnnnnnnnnnnnnnnnnnnnnnnnnnnnnnnnnnnnnnnnnnnnnnnnnnnnnnnnnnnnnnnnnnnnnnnnnnnnnnnnnnnnnnnnnnnnnnnnnnnnnnnnnnnnnnnnnnnnnnnnnnnnnnnnnnnnnnnnnnnnnnnnnnnnnnnnnnnnnnnnnnnnnnnnnnnnnnnnnnnnnnnnnnnnnnnnnnnnnnnnnnnnnnnnnnnnnnnnnnnnnnnnnnnnnnnnnnnnnnnnnnnnnnnnnnnnnnnnnnnnnnnnnnnnnnnnnnnnnnnnnnnnnnnnnnnnnnnnnnnnnnnnnnnnnnnnnnnnnnnnnnnnnnnnnnnnnnnnnnnnnnnnnnnnnnnnnnnnnnnnnnnnnnnnnnnnnnnnnnnnnnnnnnnnnnnnnnnnnnnnnnnnnnnnnnnnnnnnnnnnnnnnnnnnnnnnnnnnnnnnnnnnnnnnnnnnnnnnnnnnnnnnnnnnnnnnnnnnnnnnnnnnnnnnnnnnnnnnnnnnnnnnnnnnnnnnnnnnnnnnnnnnnnnnnnnnnnnnnnnnnnnnnnnnnnnnnnnnnnnnnnnnnnnnnnnnnnnnnnnnnnnnnnnnnnnnnnnnnnnnnnnnnnnnnnnnnnnnnnnnnnnnnnnnnnnnnnnnnnnnnnnnnnnnnnnnnnnnnnnnnnnnnnnnnnnnnnnnnnnnnnnnnnnnnnnnnnnnnnnnnnnnnnnnnnnnnnnnnnnnnnnnnnnnnnnnnnnnnnnnnnnnnnnnnnnnnnnnnnnnnnnnnnnnnnnnnnnnnnnnnnnnnnnnnnnnnnnnnnnnnnnnnnnnnnnnnnnnnnnnnnnnnnnnnnnnnnnnnnnnnnnnnnnnnnnnnnnnnnnnnnnnnnnnnnnnnnnnnnnnnnnnnnnnnnnnnnnnnnnnnnnnnnnnnnnnnnnnnnnnnnnnnnnnnnnnnnnnnnnnnnnnnnnnnnnnnnnnnnnnnnnnnnnnnnnnnnnnnnnnnnnnnnnnnnnnnnnnnnnnnnnnnnnnnnnnnnnnnnnnnnnnnnnnnnnnnnnnnnnnnnnnnnnnnnnnnnnnnnnnnnnnnnnnnnnnnnnnnnnnnnnnnnnnnnnnnnnnnnnnnnnnnnnnnnnnnnnnnnnnnnnnnnnnnnnnnnnnnnnnnnnnnnnnnnnnnnnnnnnnnnnnnnnnnnnnnnnnnnnnnnnnnnnnnnnnnnnnnnnnnnnnnnnnnnnnnnnnnnnnnnnnnnnnnnnnnnnnnnnnnnnnnnnnnnnnnnnnnnnnnnnnnnnnnnnnnnnnnnnnnnnnnnnnnnnnnnnnnnnnnnnnnnnnnnnnnnnnnnnnnnnnnnnnnnnnnnnnnnnnnnnnnnnnnnnnnnnnnnnnnnnnnnnnnnnnnnnnnnnnnnnnnnnnnnnnnnnnnnnnnnnnnnnnnnnnnnnnnnnnnnnnnnnnnnnnnnnnnnnnnnnnnnnnnnnnnnnnnnnnnnnnnnnnnnnnnnnnnnnnnnnnnnnnnnnnnnnnnnnnnnnnnnnnnnnnnnnnnnnnnnnnnnnnnnnnnnnnnnnnnnnnnnnnnnnnnnnnnnnnnnnnnnnnnnnnnnnnnnnnnnnnnnnnnnnnnnnnnnnnnnnnnnnnnnnnnnnnnnnnnnnnnnnnnnnnnnnnnnnnnnnnnnnnnnnnnnnnnnnnnnnnnnnnnnnnnnnnnnnnnnnnnnnnnnnnnnnnnnnnnnnnnnnnnnnnnnnnnnnnnnnnnnnnnnnnnnnnnnnnnnnnnnnnnnnnnnnnnnnnnnnnnnnnnnnnnnnnnnnnnnnnnnnnnnnnnnnnnnnnnnnnnnnnnnnnnnnnnnnnnnnnnnnnnnnnnnnnnnnnnnnnnnnnnnnnnnnnnnnnnnnnnnnnnnnnnnnnnnnnnnnnnnnnnnnnnnnnnnnnnnnnnnnnnnnnnnnnnnnnnnnnnnnnnnnnnnnnnnnnnnnnnnnnnnnnnnnnnnnnnnnnnnnnnnnnnnnnnnnnnnnnnnnnnnnnnnnnnnnnnnnnnnnnnnnnnnnnnnnnnnnnnnnnnnnnnnnnnnnnnnnnnnnnnnnnnnnnnnnnnnnnnnnnnnnnnnnnnnnnnnnnnnnnnnnnnnnnnnnnnnnnnnnnnnnnnnnnnnnnnnnnnnnnnnnnnnnnnnnnnnnnnnnnnnnnnnnnnnnnnnnnnnnnnnnnnnnnnnnnnnnnnnnnnnnnnnnnnnnnnnnnnnnnnnnnnnnnnnnnnnnnnnnnnnnnnnnnnnnnnnnnnnnnnnnnnnnnnnnnnnnnnnnnnnnnnnnnnnnnnnnnnnnnnnnnnnnnnnnnnnnnnnnnnnnnnnnnnnnnnnnnnnnnnnnnnnnnnnnnnnnnnnnnnnnnnnnnnnnnnnnnnnnnnnnnnnnnnnnnnnnnnnnnnnnnnnnnnnnnnnnnnnnnnnnnnnnnnnnnnnnnnnnnnnnnnnnnnnnnnnnnnnnnnnnnnnnnnnnnnnnnnnnnnnnnnnnnnnnnnnnnnnnnnnnnnnnnnnnnnnnnnnnnnnnnnnnnnnnnnnnnnnnnnnnnnnnnnnnnnnnnnnnnnnnnnnnnnnnnnnnnnnnnnnnnnnnnnnnnnnnnnnnnnnnnnnnnnnnnnnnnnnnnnnnnnnnnnnnnnnnnnnnnnnnnnnnnnnnnnnnnnnnnnnnnnnnnnnnnnnnnnnnnnnnnnnnnnnnnnnnnnnnnnnnnnnnnnnnnnnnnnnnnnnnnnnnnnnnnnnnnnnnnnnnnnnnnnnnnnnnnnnnnnnnnnnnnnnnnnnnnnnnnnnnnnnnnnnnnnnnnnnnnnnnnnnnnnnnnnnnnnnnnnnnnnnnnnnnnnnnnnnnnnnnnnnnnnnnnnnnnnnnnnnnnnnnnnnnnnnnnnnnnnnnnnnnnnnnnnnnnnnnnnnnnnnnnnnnnnnnnnnnnnnnnnnnnnnnnnnnnnnnnnnnnnnnnnnnnnnnnnnnnnnnnnnnnnnnnnnnnnnnnnnnnnnnnnnnnnnnnnnnnnnnnnnnnnnnnnnnnnnnnnnnnnnnnnnnnnnnnnnnnnnnnnnnnnnnnnnnnnnnnnnnnnnnnnnnnnnnnnnnnnnnnnnnnnnnnnnnnnnnnnnnnnnnnnnnnnnnnnnnnnnnnnnnnnnnnnnnnnnnnnnnnnnnnnnnnnnnnnnnnnnnnnnnnnnnnnnnnnnnnnnnnnnnnnnnnnnnnnnnnnnnnnnnnnnnnnnnnnnnnnnnnnnnnnnnnnnnnnnnnnnnnnnnnnnnnnnnnnnnnnnnnnnnnnnnnnnnnnnnnnnnnnnnnnnnnnnnnnnnnnnnnnnnnnnnnnnnnnnnnnnnnnnnnnnnnnnnnnnnnnnnnnnnnnnnnnnnnnnnnnnnnnnnnnnnnnnnnnnnnnnnnnnnnnnnnnnnnnnnnnnnnnnnnnnnnnnnnnnnnnnnnnnnnnnnnnnnnnnnnnnnnnnnnnnnnnnnnnnnnnnnnnnnnnnnnnnnnnnnnnnnnnnnnnnnnnnnnnnnnnnnnnnnnnnnnnnnnnnnnnnnnnnnnnnnnnnnnnnnnnnnnnnnnnnnnnnnnnnnnnnnnnnnnnnnnnnnnnnnnnnnnnnnnnnnnnnnnnnnnnnnnnnnnnnnnnnnnnnnnnnnnnnnnnnnnnnnnnnnnnnnnnnnnnnnnnnnnnnnnnnnnnnnnnnnnnnnnnnnnnnnnnnnnnnnnnnnnnnnnnnnnnnnnnnnnnnnnnnnnnnnnnnnnnnnnnnnnnnnnnnnnnnnnnnnnnnnnnnnnnnnnnnnnnnnnnnnnnnnnnnnnnnnnnnnnnnnnnnnnnnnnnnnnnnnnnnnnnnnnnnnnnnnnnnnnnnnnnnnnnnnnnnnnnnnnnnnnnnnnnnnnnnnnnnnnnnnnnnnnnnnnnnnnnnnnnnnnnnnnnnnnnnnnnnnnnnnnnnnnnnnnnnnnnnnnnnnnnnnnnnnnnnnnnnnnnnnnnnnnnnnnnnnnnnnnnnnnnnnnnnnnnnnnnnnnnnnnnnnnnnnnnnnnnnnnnnnnnnnnnnnnnnnnnnnnnnnnnnnnnnnnnnnnnnnnnnnnnnnnnnnnnnnnnnnnnnnnnnnnnnnnnnnnnnnnnnnnnnnnnnnnnnnnnnnnnnnnnnnnnnnnnnnnnnnnnnnnnnnnnnnnnnnnnnnnnnnnnnnnnnnnnnnnnnnnnnnnnnnnnnnnnnnnnnnnnnnnnnnnnnnnnnnnnnnnnnnnnnnnnnnnnnnnnnnnnnnnnnnnnnnnnnnnnnnnnnnnnnnnnnnnnnnnnnnnnnnnnnnnnnnnnnnnnnnnnnnnnnnnnnnnnnnnnnnnnnnnnnnnnnnnnnnnnnnnnnnnnnnnnnnnnnnnnnnnnnnnnnnnnnnnnnnnnnnnnnnnnnnnnnnnnnnnnnnnnnnnnnnnnnnnnnnnnnnnnnnnnnnnnnnnnnnnnnnnnnnnnnnnnnnnnnnnnnnnnnnnnnnnnnnnnnnnnnnnnnnnnnnnnnnnnnnnnnnnnnnnnnnnnnnnnnnnnnnnnnnnnnnnnnnnnnnnnnnnnnnnnnnnnnnnnnnnnnnnnnnnnnnnnnnnnnnnnnnnnnnnnnnnnnnnnnnnnnnnnnnnnnnnnnnnnnnnnnnnnnnnnnnnnnnnnnnnnnnnnnnnnnnnnnnnnnnnnnnnnnnnnnnnnnnnnnnnnnnnnnnnnnnnnnnnnnnnnnnnnnnnnnnnnnnnnnnnnnnnnnnnnnnnnnnnnnnnnnnnnnnnnnnnnnnnnnnnnnnnnnnnnnnnnnnnnnnnnnnnnnnnnnnnnnnnnnnnnnnnnnnnnnnnnnnnnnnnnnnnnnnnnnnnnnnnnnnnnnnnnnnnnnnnnnnnnnnnnnnnnnnnnnnnnnnnnnnnnnnnnnnnnnnnnnnnnnnnnnnnnnnnnnnnnnnnnnnnnnnnnnnnnnnnnnnnnnnnnnnnnnnnnnnnnnnnnnnnnnnnnnnnnnnnnnnnnnnnnnnnnnnnnnnnnnnnnnnnnnnnnnnnnnnnnnnnnnnnnnnnnnnnnnnnnnnnnnnnnnnnnnnnnnnnnnnnnnnnnnnnnnnnnnnnnnnnnnnnnnnnnnnnnnnnnnnnnnnnnnnnnnnnnnnnnnnnnnnnnnnnnnnnnnnnnnnnnnnnnnnnnnnnnnnnnnnnnnnnnnnnnnnnnnnnnnnnnnnnnnnnnnnnnnnnnnnnnnnnnnnnnnnnnnnnnnnnnnnnnnnnnnnnnnnnnnnnnnnnnnnnnnnnnnnnnnnnnnnnnnnnnnnnnnnnnnnnnnnnnnnnnnnnnnnnnnnnnnnnnnnnnnnnnnnnnnnnnnnnnnnnnnnnnnnnnnnnnnnnnnnnnnnnnnnnnnnnnnnnnnnnnnnnnnnnnnnnnnnnnnnnnnnnnnnnnnnnnnnnnnnnnnnnnnnnnnnnnnnnnnnnnnnnnnnnnnnnnnnnnnnnnnnnnnnnnnnnnnnnnnnnnnnnnnnnnnnnnnnnnnnnnnnnnnnnnnnnnnnnnnnnnnnnnnnnnnnnnnnnnnnnnnnnnnnnnnnnnnnnnnnnnnnnnnnnnnnnnnnnnnnnnnnnnnnnnnnnnnnnnnnnnnnnnnnnnnnnnnnnnnnnnnnnnnnnnnnnnnnnnnnnnnnnnnnnnnnnnnnnnnnnnnnnnnnnnnnnnnnnnnnnnnnnnnnnnnnnnnnnnnnnnnnnnnnnnnnnnnnnnnnnnnnnnnnnnnnnnnnnnnnnnnnnnnnnnnnnnnnnnnnnnnnnnnnnnnnnnnnnnnnnnnnnnnnnnnnnnnnnnnnnnnnnnnnnnnnnnnnnnnnnnnnnnnnnnnnnnnnnnnnnnnnnnnnnnnnnnnnnnnnnnnnnnnnnnnnnnnnnnnnnnnnnnnnnnnnnnnnnnnnnnnnnnnnnnnnnnnnnnnnnnnnnnnnnnnnnnnnnnnnnnnnnnnnnnnnnnnnnnnnnnnnnnnnnnnnnnnnnnnnnnnnnnnnnnnnnnnnnnnnnnnnnnnnnnnnnnnnnnnnnnnnnnnnnnnnnnnnnnnnnnnnnnnnnnnnnnnnnnnnnnnnnnnnnnnnnnnnnnnnnnnnnnnnnnnnnnnnnnnnnnnnnnnnnnnnnnnnnnnnnnnnnnnnnnnnnnnnnnnnnnnnnnnnnnnnnnnnnnnnnnnnnnnnnnnnnnnnnnnnnnnnnnnnnnnnnnnnnnnnnnnnnnnnnnnnnnnnnnnnnnnnnnnnnnnnnnnnnnnnnnnnnnnnnnnnnnnnnnnnnnnnnnnnnnnnnnnnnnnnnnnnnnnnnnnnnnnnnnnnnnnnnnnnnnnnnnnnnnnnnnnnnnnnnnnnnnnnnnnnnnnnnnnnnnnnnnnnnnnnnnnnnnnnnnnnnnnnnnnnnnnnnnnnnnnnnnnnnnnnnnnnnnnnnnnnnnnnnnnnnnnnnnnnnnnnnnnnnnnnnnnnnnnnnnnnnnnnnnnnnnnnnnnnnnnnnnnnnnnnnnnnnnnnnnnnnnnnnnnnnnnnnnnnnnnnnnnnnnnnnnnnnnnnnnnnnnnnnnnnnnnnnnnnnnnnnnnnnnnnnnnnnnnnnnnnnnnnnnnnnnnnnnnnnnnnnnnnnnnnnnnnnnnnnnnnnnnnnnnnnnnnnnnnnnnnnnnnnnnnnnnnnnnnnnnnnnnnnnnnnnnnnnnnnnnnnnnnnnnnnnnnnnnnnnnnnnnnnnnnnnnnnnnnnnnnnnnnnnnnnnnnnnnnnnnnnnnnnnnnnnnnnnnnnnnnnnnnnnnnnnnnnnnnnnnnnnnnnnnnnnnnnnnnnnnnnnnnnnnnnnnnnnnnnnnnnnnnnnnnnnnnnnnnnnnnnnnnnnnnnnnnnnnnnnnnnnnnnnnnnnnnnnnnnnnnnnnnnnnnnnnnnnnnnnnnnnnnnnnnnnnnnnnnnnnnnnnnnnnnnnnnnnnnnnnnnnnnnnnnnnnnnnnnnnnnnnnnnnnnnnnnnnnnnnnnnnnnnnnnnnnnnnnnnnnnnnnnnnnnnnnnnnnnnnnnnnnnnnnnnnnnnnnnnnnnnnnnnnnnnnnnnnnnnnnnnnnnnnnnnnnnnnnnnnnnnnnnnnnnnnnnnnnnnnnnnnnnnnnnnnnnnnnnnnnnnnnnnnnnnnnnnnnnnnnnnnnnnnnnnnnnnnnnnnnnnnnnnnnnnnnnnnnnnnnnnnnnnnnnnnnnnnnnnnnnnnnnnnnnnnnnnnnnnnnnnnnnnnnnnnnnnnnnnnnnnnnnnnnnnnnnnnnnnnnnnnnnnnnnnnnnnnnnnnnnnnnnnnnnnnnnnnnnnnnnnnnnnnnnnnnnnnnnnnnnnnnnnnnnnnnnnnnnnnnnnnnnnnnnnnnnnnnnnnnnnnnnnnnnnnnnnnnnnnnnnnnnnnnnnnnnnnnnnnnnnnnnnnnnnnnnnnnnnnnnnnnnnnnnnnnnnnnnnnnnnnnnnnnnnnnnnnnnnnnnnnnnnnnnnnnnnnnnnnnnnnnnnnnnnnnnnnnnnnnnnnnnnnnnnnnnnnnnnnnnnnnnnnnnnnnnnnnnnnnnnnnnnnnnnnnnnnnnnnnnnnnnnnnnnnnnnnnnnnnnnnnnnnnnnnnnnnnnnnnnnnnnnnnnnnnnnnnnnnnnnnnnnnnnnnnnnnnnnnnnnnnnnnnnnnnnnnnnnnnnnnnnnnnnnnnnnnnnnnnnnnnnnnnnnnnnnnnnnnnnnnnnnnnnnnnnnnnnnnnnnnnnnnnnnnnnnnnnnnnnnnnnnnnnnnnnnnnnnnnnnnnnnnnnnnnnnnnnnnnnnnnnnnnnnnnnnnnnnnnnnnnnnnnnnnnnnnnnnnnnnnnnnnnnnnnnnnnnnnnnnnnnnnnnnnnnnnnnnnnnnnnnnnnnnnnnnnnnnnnnnnnnnnnnnnnnnnnnnnnnnnnnnnnnnnnnnnnnnnnnnnnnnnnnnnnnnnnnnnnnnnnnnnnnnnnnnnnnnnnnnnnnnnnnnnnnnnnnnnnnnnnnnnnnnnnnnnnnnnnnnnnnnnnnnnnnnnnnnnnnnnnnnnnnnnnnnnnnnnnnnnnnnnnnnnnnnnnnnnnnnnnnnnnnnnnnnnnnnnnnnnnnnnnnnnnnnnnnnnnnnnnnnnnnnnnnnnnnnnnnnnnnnnnnnnnnnnnnnnnnnnnnnnnnnnnnnnnnnnnnnnnnnnnnnnnnnnnnnnnnnnnnnnnnnnnnnnnnnnnnnnnnnnnnnnnnnnnnnnnnnnnnnnnnnnnnnnnnnnnnnnnnnnnnnnnnnnnnnnnnnnnnnnnnnnnnnnnnnnnnnnnnnnnnnnnnnnnnnnnnnnnnnnnnnnnnnnnnnnnnnnnnnnnnnnnnnnnnnnnnnnnnnnnnnnnnnnnnnnnnnnnnnnnnnnnnnnnnnnnnnnnnnnnnnnnnnnnnnnnnnnnnnnnnnnnnnnnnnnnnnnnnnnnnnnnnnnnnnnnnnnnnnnnnnnnnnnnnnnnnnnnnnnnnnnnnnnnnnnnnnnnnnnnnnnnnnnnnnnnnnnnnnnnnnnnnnnnnnnnnnnnnnnnnnnnnnnnnnnnnnnnnnnnnnnnnnnnnnnnnnnnnnnnnnnnnnnnnnnnnnnnnnnnnnnnnnnnnnnnnnnnnnnnnnnnnnnnnnnnnnnnnnnnnnnnnnnnnnnnnnnnnnnnnnnnnnnnnnnnnnnnnnnnnnnnnnnnnnnnnnnnnnnnnnnnnnnnnnnnnnnnnnnnnnnnnnnnnnnnnnnnnnnnnnnnnnnnnnnnnnnnnnnnnnnnnnnnnnnnnnnnnnnnnnnnnnnnnnnnnnnnnnnnnnnnnnnnnnnnnnnnnnnnnnnnnnnnnnnnnnnnnnnnnnnnnnnnnnnnnnnnnnnnnnnnnnnnnnnnnnnnnnnnnnnnnnnnnnnnnnnnnnnnnnnnnnnnnnnnnnnnnnnnnnnnnnnnnnnnnnnnnnnnnnnnnnnnnnnnnnnnnnnnnnnnnnnnnnnnnnnnnnnnnnnnnnnnnnnnnnnnnnnnnnnnnnnnnnnnnnnnnnnnnnnnnnnnnnnnnnnnnnnnnnnnnnnnnnnnnnnnnnnnnnnnnnnnnnnnnnnnnnnnnnnnnnnnnnnnnnnnnnnnnnnnnnnnnnnnnnnnnnnnnnnnnnnnnnnnnnnnnnnnnnnnnnnnnnnnnnnnnnnnnnnnnnnnnnnnnnnnnnnnnnnnnnnnnnnnnnnnnnnnnnnnnnnnnnnnnnnnnnnnnnnnnnnnnnnnnnnnnnnnnnnnnnnnnnnnnnnnnnnnnnnnnnnnnnnnnnnnnnnnnnnnnnnnnnnnnnnnnnnnnnnnnnnnnnnnnnnnnnnnnnnnnnnnnnnnnnnnnnnnnnnnnnnnnnnnnnnnnnnnnnnnnnnnnnnnnnnnnnnnnnnnnnnnnnnnnnnnnnnnnnnnnnnnnnnnnnnnnnnnnnnnnnnnnnnnnnnnnnnnnnnnnnnnnnnnnnnnnnnnnnnnnnnnnnnnnnnnnnnnnnnnnnnnnnnnnnnnnnnnnnnnnnnnnnnnnnnnnnnnnnnnnnnnnnnnnnnnnnnnnnnnnnnnnnnnnnnnnnnnnnnnnnnnnnnnnnnnnnnnnnnnnnnnnnnnnnnnnnnnnnnnnnnnnnnnnnnnnnnnnnnnnnnnnnnnnnnnnnnnnnnnnnnnnnnnnnnnnnnnnnnnnnnnnnnnnnnnnnnnnnnnnnnnnnnnnnnnnnnnnnnnnnnnnnnnnnnnnnnnnnnnnnnnnnnnnnnnnnnnnnnnnnnnnnnnnnnnnnnnnnnnnnnnnnnnnnnnnnnnnnnnnnnnnnnnnnnnnnnnnnnnnnnnnnnnnnnnnnnnnnnnnnnnnnnnnnnnnnnnnnnnnnnnnnnnnnnnnnnnnnnnnnnnnnnnnnnnnnnnnnnnnnnnnnnnnnnnnnnnnnnnnnnnnnnnnnnnnnnnnnnnnnnnnnnnnnnnnnnnnnnnnnnnnnnnnnnnnnnnnnnnnnnnnnnnnnnnnnnnnnnnnnnnnnnnnnnnnnnnnnnnnnnnnnnnnnnnnnnnnnnnnnnnnnnnnnnnnnnnnnnnnnnnnnnnnnnnnnnnnnnnnnnnnnnnnnnnnnnnnnnnnnnnnnnnnnnnnnnnnnnnnnnnnnnnnnnnnnnnnnnnnnnnnnnnnnnnnnnnnnnnnnnnnnnnnnnnnnnnnnnnnnnnnnnnnnnnnnnnnnnnnnnnnnnnnnnnnnnnnnnnnnnnnnnnnnnnnnnnnnnnnnnnnnnnnnnnnnnnnnnnnnnnnnnnnnnnnnnnnnnnnnnnnnnnnnnnnnnnnnnnnnnnnnnnnnnnnnnnnnnnnnnnnnnnnnnnnnnnnnnnnnnnnnnnnnnnnnnnnnnnnnnnnnnnnnnnnnnnnnnnnnnnnnnnnnnnnnnnnnnnnnnnnnnnnnnnnnnnnnnnnnnnnnnnnnnnnnnnnnnnnnnnnnnnnnnnnnnnnnnnnnnnnnnnnnnnnnnnnnnnnnnnnnnnnnnnnnnnnnnnnnnnnnnnnnnnnnnnnnnnnnnnnnnnnnnnnnnnnnnnnnnnnnnnnnnnnnnnnnnnnnnnnnnnnnnnnnnnnnnnnnnnnnnnnnnnnnnnnnnnnnnnnnnnnnnnnnnnnnnnnnnnnnnnnnnnnnnnnnnnnnnnnnnnnnnnnnnnnnnnnnnnnnnnnnnnnnnnnnnnnnnnnnnnnnnnnnnnnnnnnnnnnnnnnnnnnnnnnnnnnnnnnnnnnnnnnnnnnnnnnnnnnnnnnnnnnnnnnnnnnnnnnnnnnnnnnnnnnnnnnnnnnnnnnnnnnnnnnnnnnnnnnnnnnnnnnnnnnnnnnnnnnnnnnnnnnnnnnnnnnnnnnnnnnnnnnnnnnnnnnnnnnnnnnnnnnnnnnnnnnnnnnnnnnnnnnnnnnnnnnnnnnnnnnnnnnnnnnnnnnnnnnnnnnnnnnnnnnnnnnnnnnnnnnnnnnnnnnnnnnnnnnnnnnnnnnnnnnnnnnnnnnnnnnnnnnnnnnnnnnnnnnnnnnnnnnnnnnnnnnnnnnnnnnnnnnnnnnnnnnnnnnnnnnnnnnnnnnnnnnnnnnnnnnnnnnnnnnnnnnnnnnnnnnnnnnnnnnnnnnnnnnnnnnnnnnnnnnnnnnnnnnnnnnnnnnnnnnnnnnnnnnnnnnnnnnnnnnnnnnnnnnnnnnnnnnnnnnnnnnnnnnnnnnnnnnnnnnnnnnnnnnnnnnnnnnnnnnnnnnnnnnnnnnnnnnnnnnnnnnnnnnnnnnnnnnnnnnnnnnnnnnnnnnnnnnnnnnnnnnnnnnnnnnnnnnnnnnnnnnnnnnnnnnnnnnnnnnnnnnnnnnnnnnnnnnnnnnnnnnnnnnnnnnnnnnnnnnnnnnnnnnnnnnnnnnnnnnnnnnnnnnnnnnnnnnnnnnnnnnnnnnnnnnnnnnnnnnnnnnnnnnnnnnnnnnnnnnnnnnnnnnnnnnnnnnnnnnnnnnnnnnnnnnnnnnnnnnnnnnnnnnnnnnnnnnnnnnnnnnnnnnnnnnnnnnnnnnnnnnnnnnnnnnnnnnnnnnnnnnnnnnnnnnnnnnnnnnnnnnnnnnnnnnnnnnnnnnnnnnnnnnnnnnnnnnnnnnnnnnnnnnnnnnnnnnnnnnnnnnnnnnnnnnnnnnnnnnnnnnnnnnnnnnnnnnnnnnnnnnnnnnnnnnnnnnnnnnnnnnnnnnnnnnnnnnnnnnnnnnnnnnnnnnnnnnnnnnnnnnnnnnnnnnnnnnnnnnnnnnnnnnnnnnnnnnnnnnnnnnnnnnnnnnnnnnnnnnnnnnnnnnnnnnnnnnnnnnnnnnnnnnnnnnnnnnnnnnnnnnnnnnnnnnnnnnnnnnnnnnnnnnnnnnnnnnnnnnnnnnnnnnnnnnnnnnnnnnnnnnnnnnnnnnnnnnnnnnnnnnnnnnnnnnnnnnnnnnnnnnnnnnnnnnnnnnnnnnnnnnnnnnnnnnnnnnnnnnnnnnnnnnnnnnnnnnnnnnnnnnnnnnnnnnnnnnnnnnnnnnnnnnnnnnnnnnnnnnnnnnnnnnnnnnnnnnnnnnnnnnnnnnnnnnnnnnnnnnnnnnnnnnnnnnnnnnnnnnnnnnnnnnnnnnnnnnnnnnnnnnnnnnnnnnnnnnnnnnnnnnnnnnnnnnnnnnnnnnnnnnnnnnnnnnnnnnnnnnnnnnnnnnnnnnnnnnnnnnnnnnnnnnnnnnnnnnnnnnnnnnnnnnnnnnnnnnnnnnnnnnnnnnnnnnnnnnnnnnnnnnnnnnnnnnnnnnnnnnnnnnnnnnnnnnnnnnnnnnnnnnnnnnnnnnnnnnnnnnnnnnnnnnnnnnnnnnnnnnnnnnnnnnnnnnnnnnnnnnnnnnnnnnnnnnnnnnnnnnnnnnnnnnnnnnnnnnnnnnnnnnnnnnnnnnnnnnnnnnnnnnnnnnnnnnnnnnnnnnnnnnnnnnnnnnnnnnnnnnnnnnnnnnnnnnnnnnnnnnnnnnnnnnnnnnnnnnnnnnnnnnnnnnnnnnnnnnnnnnnnnnnnnnnnnnnnnnnnnnnnnnnnnnnnnnnnnnnnnnnnnnnnnnnnnnnnnnnnnnnnnnnnnnnnnnnnnnnnnnnnnnnnnnnnnnnnnnnnnnnnnnnnnnnnnnnnnnnnnnnnnnnnnnnnnnnnnnnnnnnnnnnnnnnnnnnnnnnnnnnnnnnnnnnnnnnnnnnnnnnnnnnnnnnnnnnnnnnnnnnnnnnnnnnnnnnnnnnnnnnnnnnnnnnnnnnnnnnnnnnnnnnnnnnnnnnnnnnnnnnnnnnnnnnnnnnnnnnnnnnnnnnnnnnnnnnnnnnnnnnnnnnnnnnnnnnnnnnnnnnnnnnnnnnnnnnnnnnnnnnnnnnnnnnnnnnnnnnnnnnnnnnnnnnnnnnnnnnnnnnnnnnnnnnnnnnnnnnnnnnnnnnnnnnnnnnnnnnnnnnnnnnnnnnnnnnnnnnnnnnnnnnnnnnnnnnnnnnnnnnnnnnnnnnnnnnnnnnnnnnnnnnnnnnnnnnnnnnnnnnnnnnnnnnnnnnnnnnnnnnnnnnnnnnnnnnnnnnnnnnnnnnnnnnnnnnnnnnnnnnnnnnnnnnnnnnnnnnnnnnnnnnnnnnnnnnnnnnnnnnnnnnnnnnnnnnnnnnnnnnnnnnnnnnnnnnnnnnnnnnnnnnnnnnnnnnnnnnnnnnnnnnnnnnnnnnnnnnnnnnnnnnnnnnnnnnnnnnnnnnnnnnnnnnnnnnnnnnnnnnnnnnnnnnnnnnnnnnnnnnnnnnnnnnnnnnnnnnnnnnnnnnnnnnnnnnnnnnnnnnnnnnnnnnnnnnnnnnnnnnnnnnnnnnnnnnnnnnnnnnnnnnnnnnnnnnnnnnnnnnnnnnnnnnnnnnnnnnnnnnnnnnnnnnnnnnnnnnnnnnnnnnnnnnnnnnnnnnnnnnnnnnnnnnnnnnnnnnnnnnnnnnnnnnnnnnnnnnnnnnnnnnnnnnnnnnnnnnnnnnnnnnnnnnnnnnnnnnnnnnnnnnnnnnnnnnnnnnnnnnnnnnnnnnnnnnnnnnnnnnnnnnnnnnnnnnnnnnnnnnnnnnnnnnnnnnnnnnnnnnnnnnnnnnnnnnnnnnnnnnnnnnnnnnnnnnnnnnnnnnnnnnnnnnnnnnnnnnnnnnnnnnnnnnnnnnnnnnnnnnnnnnnnnnnnnnnnnnnnnnnnnnnnnnnnnnnnnnnnnnnnnnnnnnnnnnnnnnnnnnnnnnnnnnnnnnnnnnnnnnnnnnnnnnnnnnnnnnnnnnnnnnnnnnnnnnnnnnnnnnnnnnnnnnnnnnnnnnnnnnnnnnnnnnnnnnnnnnnnnnnnnnnnnnnnnnnnnnnnnnnnnnnnnnnnnnnnnnnnnnnnnnnnnnnnnnnnnnnnnnnnnnnnnnnnnnnnnnnnnnnnnnnnnnnnnnnnnnnnnnnnnnnnnnnnnnnnnnnnnnnnnnnnnnnnnnnnnnnnnnnnnnnnnnnnnnnnnnnnnnnnnnnnnnnnnnnnnnnnnnnnnnnnnnnnnnnnnnnnnnnnnnnnnnnnnnnnnnnnnnnnnnnnnnnnnnnnnnnnnnnnnnnnnnnnnnnnnnnnnnnnnnnnnnnnnnnnnnnnnnnnnnnnnnnnnnnnnnnnnnnnnnnnnnnnnnnnnnnnnnnnnnnnnnnnnnnnnnnnnnnnnnnnnnnnnnnnnnnnnnnnnnnnnnnnnnnnnnnnnnnnnnnnnnnnnnnnnnnnnnnnnnnnnnnnnnnnnnnnnnnnnnnnnnnnnnnnnnnnnnnnnnnnnnnnnnnnnnnnnnnnnnnnnnnnnnnnnnnnnnnnnnnnnnnnnnnnnnnnnnnnnnnnnnnnnnnnnnnnnnnnnnnnnnnnnnnnnnnnnnnnnnnnnnnnnnnnnnnnnnnnnnnnnnnnnnnnnnnnnnnnnnnnnnnnnnnnnnnnnnnnnnnnnnnnnnnnnnnnnnnnnnnnnnnnnnnnnnnnnnnnnnnnnnnnnnnnnnnnnnnnnnnnnnnnnnnnnnnnnnnnnnnnnnnnnnnnnnnnnnnnnnnnnnnnnnnnnnnnnnnnnnnnnnnnnnnnnnnnnnnnnnnnnnnnnnnnnnnnnnnnnnnnnnnnnnnnnnnnnnnnnnnnnnnnnnnnnnnnnnnnnnnnnnnnnnnnnnnnnnnnnnnnnnnnnnnnnnnnnnnnnnnnnnnnnnnnnnnnnnnnnnnnnnnnnnnnnnnnnnnnnnnnnnnnnnnnnnnnnnnnnnnnnnnnnnnnnnnnnnnnnnnnnnnnnnnnnnnnnnnnnnnnnnnnnnnnnnnnnnnnnnnnnnnnnnnnnnnnnnnnnnnnnnnnnnnnnnnnnnnnnnnnnnnnnnnnnnnnnnnnnnnnnnnnnnnnnnnnnnnnnnnnnnnnnnnnnnnnnnnnnnnnnnnnnnnnnnnnnnnnnnnnnnnnnnnnnnnnnnnnnnnnnnnnnnnnnnnnnnnnnnnnnnnnnnnnnnnnnnnnnnnnnnnnnnnnnnnnnnnnnnnnnnnnnnnnnnnnnnnnnnnnnnnnnnnnnnnnnnnnnnnnnnnnnnnnnnnnnnnnnnnnnnnnnnnnnnnnnnnnnnnnnnnnnnnnnnnnnnnnnnnnnnnnnnnnnnnnnnnnnnnnnnnnnnnnnnnnnnnnnnnnnnnnnnnnnnnnnnnnnnnnnnnnnnnnnnnnnnnnnnnnnnnnnnnnnnnnnnnnnnnnnnnnnnnnnnnnnnnnnnnnnnnnnnnnnnnnnnnnnnnnnnnnnnnnnnnnnnnnnnnnnnnnnnnnnnnnnnnnnnnnnnnnnnnnnnnnnnnnnnnnnnnnnnnnnnnnnnnnnnnnnnnnnnnnnnnnnnnnnnnnnnnnnnnnnnnnnnnnnnnnnnnnnnnnnnnnnnnnnnnnnnnnnnnnnnnnnnnnnnnnnnnnnnnnnnnnnnnnnnnnnnnnnnnnnnnnnnnnnnnnnnnnnnnnnnnnnnnnnnnnnnnnnnnnnnnnnnnnnnnnnnnnnnnnnnnnnnnnnnnnnnnnnnnnnnnnnnnnnnnnnnnnnnnnnnnnnnnnnnnnnnnnnnnnnnnnnnnnnnnnnnnnnnnnnnnnnnnnnnnnnnnnnnnnnnnnnnnnnnnnnnnnnnnnnnnnnnnnnnnnnnnnnnnnnnnnnnnnnnnnnnnnnnnnnnnnnnnnnnnnnnnnnnnnnnnnnnnnnnnnnnnnnnnnnnnnnnnnnnnnnnnnnnnnnnnnnnnnnnnnnnnnnnnnnnnnnnnnnnnnnnnnnnnnnnnnnnnnnnnnnnnnnnnnnnnnnnnnnnnnnnnnnnnnnnnnnnnnnnnnnnnnnnnnnnnnnnnnnnnnnnnnnnnnnnnnnnnnnnnnnnnnnnnnnnnnnnnnnnnnnnnnnnnnnnnnnnnnnnnnnnnnnnnnnnnnnnnnnnnnnnnnnnnnnnnnnnnnnnnnnnnnnnnnnnnnnnnnnnnnnnnnnnnnnnnnnnnnnnnnnnnnnnnnnnnnnnnnnnnnnnnnnnnnnnnnnnnnnnnnnnnnnnnnnnnnnnnnnnnnnnnnnnnnnnnnnnnnnnnnnnnnnnnnnnnnnnnnnnnnnnnnnnnnnnnnnnnnnnnnnnnnnnnnnnnnnnnnnnnnnnnnnnnnnnnnnnnnnnnnnnnnnnnnnnnnnnnnnnnnnnnnnnnnnnnnnnnnnnnnnnnnnnnnnnnnnnnnnnnnnnnnnnnnnnnnnnnnnnnnnnnnnnnnnnnnnnnnnnnnnnnnnnnnnnnnnnnnnnnnnnnnnnnnnnnnnnnnnnnnnnnnnnnnnnnnnnnnnnnnnnnnnnnnnnnnnnnnnnnnnnnnnnnnnnnnnnnnnnnnnnnnnnnnnnnnnnnnnnnnnnnnnnnnnnnnnnnnnnnnnnnnnnnnnnnnnnnnnnnnnnnnnnnnnnnnnnnnnnnnnnnnnnnnnnnnnnnnnnnnnnnnnnnnnnnnnnnnnnnnnnnnnnnnnnnnnnnnnnnnnnnnnnnnnnnnnnnnnnnnnnnnnnnnnnnnnnnnnnnnnnnnnnnnnnnnnnnnnnnnnnnnnnnnnnnnnnnnnnnnnnnnnnnnnnnnnnnnnnnnnnnnnnnnnnnnnnnnnnnnnnnnnnnnnnnnnnnnnnnnnnnnnnnnnnnnnnnnnnnnnnnnnnnnnnnnnnnnnnnnnnnnnnnnnnnnnnnnnnnnnnnnnnnnnnnnnnnnnnnnnnnnnnnnnnnnnnnnnnnnnnnnnnnnnnnnnnnnnnnnnnnnnnnnnnnnnnnnnnnnnnnnnnnnnnnnnnnnnnnnnnnnnnnnnnnnnnnnnnnnnnnnnnnnnnnnnnnnnnnnnnnnnnnnnnnnnnnnnnnnnnnnnnnnnnnnnnnnnnnnnnnnnnnnnnnnnnnnnnnnnnnnnnnnnnnnnnnnnnnnnnnnnnnnnnnnnnnnnnnnnnnnnnnnnnnnnnnnnnnnnnnnnnnnnnnnnnnnnnnnnnnnnnnnnnnnnnnnnnnnnnnnnnnnnnnnnnnnnnnnnnnnnnnnnnnnnnnnnnnnnnnnnnnnnnnnnnnnnnnnnnnnnnnnnnnnnnnnnnnnnnnnnnnnnnnnnnnnnnnnnnnnnnnnnnnnnnnnnnnnnnnnnnnnnnnnnnnnnnnnnnnnnnnnnnnnnnnnnnnnnnnnnnnnnnnnnnnnnnnnnnnnnnnnnnnnnnnnnnnnnnnnnnnnnnnnnnnnnnnnnnnnnnnnnnnnnnnnnnnnnnnnnnnnnnnnnnnnnnnnnnnnnnnnnnnnnnnnnnnnnnnnnnnnnnnnnnnnnnnnnnnnnnnnnnnnnnnnnnnnnnnnnnnnnnnnnnnnnnnnnnnnnnnnnnnnnnnnnnnnnnnnnnnnnnnnnnnnnnnnnnnnnnnnnnnnnnnnnnnnnnnnnnnnnnnnnnnnnnnnnnnnnnnnnnnnnnnnnnnnnnnnnnnnnnnnnnnnnnnnnnnnnnnnnnnnnnnnnnnnnnnnnnnnnnnnnnnnnnnnnnnnnnnnnnnnnnnnnnnnnnnnnnnnnnnnnnnnnnnnnnnnnnnnnnnnnnnnnnnnnnnnnnnnnnnnnnnnnnnnnnnnnnnnnnnnnnnnnnnnnnnnnnnnnnnnnnnnnnnnnnnnnnnnnnnnnnnnnnnnnnnnnnnnnnnnnnnnnnnnnnnnnnnnnnnnnnnnnnnnnnnnnnnnnnnnnnnnnnnnnnnnnnnnnnnnnnnnnnnnnnnnnnnnnnnnnnnnnnnnnnnnnnnnnnnnnnnnnnnnnnnnnnnnnnnnnnnnnnnnnnnnnnnnnnnnnnnnnnnnnnnnnnnnnnnnnnnnnnnnnnnnnnnnnnnnnnnnnnnnnnnnnnnnnnnnnnnnnnnnnnnnnnnnnnnnnnnnnnnnnnnnnnnnnnnnnnnnnnnnnnnnnnnnnnnnnnnnnnnnnnnnnnnnnnnnnnnnnnnnnnnnnnnnnnnnnnnnnnnnnnnnnnnnnnnnnnnnnnnnnnnnnnnnnnnnnnnnnnnnnnnnnnnnnnnnnnnnnnnnnnnnnnnnnnnnnnnnnnnnnnnnnnnnnnnnnnnnnnnnnnnnnnnnnnnnnnnnnnnnnnnnnnnnnnnnnnnnnnnnnnnnnnnnnnnnnnnnnnnnnnnnnnnnnnnnnnnnnnnnnnnnnnnnnnnnnnnnnnnnnnnnnnnnnnnnnnnnnnnnnnnnnnnnnnnnnnnnnnnnnnnnnnnnnnnnnnnnnnnnnnnnnnnnnnnnnnnnnnnnnnnnnnnnnnnnnnnnnnnnnnnnnnnnnnnnnnnnnnnnnnnnnnnnnnnnnnnnnnnnnnnnnnnnnnnnnnnnnnnnnnnnnnnnnnnnnnnnnnnnnnnnnnnnnnnnnnnnnnnnnnnnnnnnnnnnnnnnnnnnnnnnnnnnnnnnnnnnnnnnnnnnnnnnnnnnnnnnnnnnnnnnnnnnnnnnnnnnnnnnnnnnnnnnnnnnnnnnnnnnnnnnnnnnnnnnnnnnnnnnnnnnnnnnnnnnnnnnnnnnnnnnnnnnnnnnnnnnnnnnnnnnnnnnnnnnnnnnnnnnnnnnnnnnnnnnnnnnnnnnnnnnnnnnnnnnnnnnnnnnnnnnnnnnnnnnnnnnnnnnnnnnnnnnnnnnnnnnnnnnnnnnnnnnnnnnnnnnnnnnnnnnnnnnnnnnnnnnnnnnnnnnnnnnnnnnnnnnnnnnnnnnnnnnnnnnnnnnnnnnnnnnnnnnnnnnnnnnnnnnnnnnnnnnnnnnnnnnnnnnnnnnnnnnnnnnnnnnnnnnnnnnnnnnnnnnnnnnnnnnnnnnnnnnnnnnnnnnnnnnnnnnnnnnnnnnnnnnnnnnnnnnnnnnnnnnnnnnnnnnnnnnnnnnnnnnnnnnnnnnnnnnnnnnnnnnnnnnnnnnnnnnnnnnnnnnnnnnnnnnnnnnnnnnnnnnnnnnnnnnnnnnnnnnnnnnnnnnnnnnnnnnnnnnnnnnnnnnnnnnnnnnnnnnnnnnnnnnnnnnnnnnnnnnnnnnnnnnnnnnnnnnnnnnnnnnnnnnnnnnnnnnnnnnnnnnnnnnnnnnnnnnnnnnnnnnnnnnnnnnnnnnnnnnnnnnnnnnnnnnnnnnnnnnnnnnnnnnnnnnnnnnnnnnnnnnnnnnnnnnnnnnnnnnnnnnnnnnnnnnnnnnnnnnnnnnnnnnnnnnnnnnnnnnnnnnnnnnnnnnnnnnnnnnnnnnnnnnnnnnnnnnnnnnnnnnnnnnnnnnnnnnnnnnnnnnnnnnnnnnnnnnnnnnnnnnnnnnnnnnnnnnnnnnnnnnnnnnnnnnnnnnnnnnnnnnnnnnnnnnnnnnnnnnnnnnnnnnnnnnnnnnnnnnnnnnnnnnnnnnnnnnnnnnnnnnnnnnnnnnnnnnnnnnnnnnnnnnnnnnnnnnnnnnnnnnnnnnnnnnnnnnnnnnnnnnnnnnnnnnnnnnnnnnnnnnnnnnnnnnnnnnnnnnnnnnnnnnnnnnnnnnnnnnnnnnnnnnnnnnnnnnnnnnnnnnnnnnnnnnnnnnnnnnnnnnnnnnnnnnnnnnnnnnnnnnnnnnnnnnnnnnnnnnnnnnnnnnnnnnnnnnnnnnnnnnnnnnnnnnnnnnnnnnnnnnnnnnnnnnnnnnnnnnnnnnnnnnnnnnnnnnnnnnnnnnnnnnnnnnnnnnnnnnnnnnnnnnnnnnnnnnnnnnnnnnnnnnnnnnnnnnnnnnnnnnnnnnnnnnnnnnnnnnnnnnnnnnnnnnnnnnnnnnnnnnnnnnnnnnnnnnnnnnnnnnnnnnnnnnnnnnnnnnnnnnnnnnnnnnnnnnnnnnnnnnnnnnnnnnnnnnnnnnnnnnnnnnnnnnnnnnnnnnnnnnnnnnnnnnnnnnnnnnnnnnnnnnnnnnnnnnnnnnnnnnnnnnnnnnnnnnnnnnnnnnnnnnnnnnnnnnnnnnnnnnnnnnnnnnnnnnnnnnnnnnnnnnnnnnnnnnnnnnnnnnnnnnnnnnnnnnnnnnnnnnnnnnnnnnnnnnnnnnnnnnnnnnnnnnnnnnnnnnnnnnnnnnnnnnnnnnnnnnnnnnnnnnnnnnnnnnnnnnnnnnnnnnnnnnnnnnnnnnnnnnnnnnnnnnnnnnnnnnnnnnnnnnnnnnnnnnnnnnnnnnnnnnnnnnnnnnnnnnnnnnnnnnnnnnnnnnnnnnnnnnnnnnnnnnnnnnnnnnnnnnnnnnnnnnnnnnnnnnnnnnnnnnnnnnnnnnnnnnnnnnnnnnnnnnnnnnnnnnnnnnnnnnnnnnnnnnnnnnnnnnnnnnnnnnnnnnnnnnnnnnnnnnnnnnnnnnnnnnnnnnnnnnnnnnnnnnnnnnnnnnnnnnnnnnnnnnnnnnnnnnnnnnnnnnnnnnnnnnnnnnnnnnnnnnnnnnnnnnnnnnnnnnnnnnnnnnnnnnnnnnnnnnnnnnnnnnnnnnnnnnnnnnnnnnnnnnnnnnnnnnnnnnnnnnnnnnnnnnnnnnnnnnnnnnnnnnnnnnnnnnnnnnnnnnnnnnnnnnnnnnnnnnnnnnnnnnnnnnnnnnnnnnnnnnnnnnnnnnnnnnnnnnnnnnnnnnnnnnnnnnnnnnnnnnnnnnnnnnnnnnnnnnnnnnnnnnnnnnnnnnnnnnnnnnnnnnnnnnnnnnnnnnnnnnnnnnnnnnnnnnnnnnnnnnnnnnnnnnnnnnnnnnnnnnnnnnnnnnnnnnnnnnnnnnnnnnnnnnnnnnnnnnnnnnnnnnnnnnnnnnnnnnnnnnnnnnnnnnnnnnnnnnnnnnnnnnnnnnnnnnnnnnnnnnnnnnnnnnnnnnnnnnnnnnnnnnnnnnnnnnnnnnnnnnnnnnnnnnnnnnnnnnnnnnnnnnnnnnnnnnnnnnnnnnnnnnnnnnnnnnnnnnnnnnnnnnnnnnnnnnnnnnnnnnnnnnnnnnnnnnnnnnnnnnnnnnnnnnnnnnnnnnnnnnnnnnnnnnnnnnnnnnnnnnnnnnnnnnnnnnnnnnnnnnnnnnnnnnnnnnnnnnnnnnnnnnnnnnnnnnnnnnnnnnnnnnnnnnnnnnnnnnnnnnnnnnnnnnnnnnnnnnnnnnnnnnnnnnnnnnnnnnnnnnnnnnnnnnnnnnnnnnnnnnnnnnnnnnnnnnnnnnnnnnnnnnnnnnnnnnnnnnnnnnnnnnnnnnnnnnnnnnnnnnnnnnnnnnnnnnnnnnnnnnnnnnnnnnnnnnnnnnnnnnnnnnnnnnnnnnnnnnnnnnnnnnnnnnnnnnnnnnnnnnnnnnnnnnnnnnnnnnnnnnnnnnnnnnnnnnnnnnnnnnnnnnnnnnnnnnnnnnnnnnnnnnnnnnnnnnnnnnnnnnnnnnnnnnnnnnnnnnnnnnnnnnnnnnnnnnnnnnnnnnnnnnnnnnnnnnnnnnnnnnnnnnnnnnnnnnnnnnnnnnnnnnnnnnnnnnnnnnnnnnnnnnnnnnnnnnnnnnnnnnnnnnnnnnnnnnnnnnnnnnnnnnnnnnnnnnnnnnnnnnnnnnnnnnnnnnnnnnnnnnnnnnnnnnnnnnnnnnnnnnnnnnnnnnnnnnnnnnnnnnnnnnnnnnnnnnnnnnnnnnnnnnnnnnnnnnnnnnnnnnnnnnnnnnnnnnnnnnnnnnnnnnnnnnnnnnnnnnnnnnnnnnnnnnnnnnnnnnnnnnnnnnnnnnnnnnnnnnnnnnnnnnnnnnnnnnnnnnnnnnnnnnnnnnnnnnnnnnnnnnnnnnnnnnnnnnnnnnnnnnnnnnnnnnnnnnnnnnnnnnnnnnnnnnnnnnnnnnnnnnnnnnnnnnnnnnnnnnnnnnnnnnnnnnnnnnnnnnnnnnnnnnnnnnnnnnnnnnnnnnnnnnnnnnnnnnnnnnnnnnnnnnnnnnnnnnnnnnnnnnnnnnnnnnnnnnnnnnnnnnnnnnnnnnnnnnnnnnnnnnnnnnnnnnnnnnnnnnnnnnnnnnnnnnnnnnnnnnnnnnnnnnnnnnnnnnnnnnnnnnnnnnnnnnnnnnnnnnnnnnnnnnnnnnnnnnnnnnnnnnnnnnnnnnnnnnnnnnnnnnnnnnnnnnnnnnnnnnnnnnnnnnnnnnnnnnnnnnnnnnnnnnnnnnnnnnnnnnnnnnnnnnnnnnnnnnnnnnnnnnnnnnnnnnnnnnnnnnnnnnnnnnnnnnnnnnnnnnnnnnnnnnnnnnnnnnnnnnnnnnnnnnnnnnnnnnnnnnnnnnnnnnnnnnnnnnnnnnnnnnnnnnnnnnnnnnnnnnnnnnnnnnnnnnnnnnnnnnnnnnnnnnnnnnnnnnnnnnnnnnnnnnnnnnnnnnnnnnnnnnnnnnnnnnnnnnnnnnnnnnnnnnnnnnnnnnnnnnnnnnnnnnnnnnnnnnnnnnnnnnnnnnnnnnnnnnnnnnnnnnnnnnnnnnnnnnnnnnnnnnnnnnnnnnnnnnnnnnnnnnnnnnnnnnnnnnnnnnnnnnnnnnnnnnnnnnnnnnnnnnnnnnnnnnnnnnnnnnnnnnnnnnnnnnnnnnnnnnnnnnnnnnnnnnnnnnnnnnnnnnnnnnnnnnnnnnnnnnnnnnnnnnnnnnnnnnnnnnnnnnnnnnnnnnnnnnnnnnnnnnnnnnnnnnnnnnnnnnnnnnnnnnnnnnnnnnnnnnnnnnnnnnnnnnnnnnnnnnnnnnnnnnnnnnnnnnnnnnnnnnnnnnnnnnnnnnnnnnnnnnnnnnnnnnnnnnnnnnnnnnnnnnnnnnnnnnnnnnnnnnnnnnnnnnnnnnnnnnnnnnnnnnnnnnnnnnnnnnnnnnnnnnnnnnnnnnnnnnnnnnnnnnnnnnnnnnnnnnnnnnnnnnnnnnnnnnnnnnnnnnnnnnnnnnnnnnnnnnnnnnnnnnnnnnnnnnnnnnnnnnnnnnnnnnnnnnnnnnnnnnnnnnnnnnnnnnnnnnnnnnnnnnnnnnnnnnnnnnnnnnnnnnnnnnnnnnnnnnnnnnnnnnnnnnnnnnnnnnnnnnnnnnnnnnnnnnnnnnnnnnnnnnnnnnnnnnnnnnnnnnnnnnnnnnnnnnnnnnnnnnnnnnnnnnnnnnnnnnnnnnnnnnnnnnnnnnnnnnnnnnnnnnnnnnnnnnnnnnnnnnnnnnnnnnnnnnnnnnnnnnnnnnnnnnnnnnnnnnnnnnnnnnnnnnnnnnnnnnnnnnnnnnnnnnnnnnnnnnnnnnnnnnnnnnnnnnnnnnnnnnnnnnnnnnnnnnnnnnnnnnnnnnnnnnnnnnnnnnnnnnnnnnnnnnnnnnnnnnnnnnnnnnnnnnnnnnnnnnnnnnnnnnnnnnnnnnnnnnnnnnnnnnnnnnnnnnnnnnnnnnnnnnnnnnnnnnnnnnnnnnnnnnnnnnnnnnnnnnnnnnnnnnnnnnnnnnnnnnnnnnnnnnnnnnnnnnnnnnnnnnnnnnnnnnnnnnnnnnnnnnnnnnnnnnnnnnnnnnnnnnnnnnnnnnnnnnnnnnnnnnnnnnnnnnnnnnnnnnnnnnnnnnnnnnnnnnnnnnnnnnnnnnnnnnnnnnnnnnnnnnnnnnnnnnnnnnnnnnnnnnnnnnnnnnnnnnnnnnnnnnnnnnnnnnnnnnnnnnnnnnnnnnnnnnnnnnnnnnnnnnnnnnnnnnnnnnnnnnnnnnnnnnnnnnnnnnnnnnnnnnnnnnnnnnnnnnnnnnnnnnnnnnnnnnnnnnnnnnnnnnnnnnnnnnnnnnnnnnnnnnnnnnnnnnnnnnnnnnnnnnnnnnnnnnnnnnnnnnnnnnnnnnnnnnnnnnnnnnnnnnnnnnnnnnnnnnnnnnnnnnnnnnnnnnnnnnnnnnnnnnnnnnnnnnnnnnnnnnnnnnnnnnnnnnnnnnnnnnnnnnnnnnnnnnnnnnnnnnnnnnnnnnnnnnnnnnnnnnnnnnnnnnnnnnnnnnnnnnnnnnnnnnnnnnnnnnnnnnnnnnnnnnnnnnnnnnnnnnnnnnnnnnnnnnnnnnnnnnnnnnnnnnnnnnnnnnnnnnnnnnnnnnnnnnnnnnnnnnnnnnnnnnnnnnnnnnnnnnnnnnnnnnnnnnnnnnnnnnnnnnnnnnnnnnnnnnnnnnnnnnnnnnnnnnnnnnnnnnnnnnnnnnnnnnnnnnnnnnnnnnnnnnnnnnnnnnnnnnnnnnnnnnnnnnnnnnnnnnnnnnnnnnnnnnnnnnnnnnnnnnnnnnnnnnnnnnnnnnnnnnnnnnnnnnnnnnnnnnnnnnnnnnnnnnnnnnnnnnnnnnnnnnnnnnnnnnnnnnnnnnnnnnnnnnnnnnnnnnnnnnnnnnnnnnnnnnnnnnnnnnnnnnnnnnnnnnnnnnnnnnnnnnnnnnnnnnnnnnnnnnnnnnnnnnnnnnnnnnnnnnnnnnnnnnnnnnnnnnnnnnnnnnnnnnnnnnnnnnnnnnnnnnnnnnnnnnnnnnnnnnnnnnnnnnnnnnnnnnnnnnnnnnnnnnnnnnnnnnnnnnnnnnnnnnnnnnnnnnnnnnnnnnnnnnnnnnnnnnnnnnnnnnnnnnnnnnnnnnnnnnnnnnnnnnnnnnnnnnnnnnnnnnnnnnnnnnnnnnnnnnnnnnnnnnnnnnnnnnnnnnnnnnnnnnnnnnnnnnnnnnnnnnnnnnnnnnnnnnnnnnnnnnnnnnnnnnnnnnnnnnnnnnnnnnnnnnnnnnnnnnnnnnnnnnnnnnnnnnnnnnnnnnnnnnnnnnnnnnnnnnnnnnnnnnnnnnnnnnnnnnnnnnnnnnnnnnnnnnnnnnnnnnnnnnnnnnnnnnnnnnnnnnnnnnnnnnnnnnnnnnnnnnnnnnnnnnnnnnnnnnnnnnnnnnnnnnnnnnnnnnnnnnnnnnnnnnnnnnnnnnnnnnnnnnnnnnnnnnnnnnnnnnnnnnnnnnnnnnnnnnnnnnnnnnnnnnnnnnnnnnnnnnnnnnnnnnnnnnnnnnnnnnnnnnnnnnnnnnnnnnnnnnnnnnnnnnnnnnnnnnnnnnnnnnnnnnnnnnnnnnnnnnnnnnnnnnnnnnnnnnnnnnnnnnnnnnnnnnnnnnnnnnnnnnnnnnnnnnnnnnnnnnnnnnnnnnnnnnnnnnnnnnnnnnnnnnnnnnnnnnnnnnnnnnnnnnnnnnnnnnnnnnnnnnnnnnnnnnnnnnnnnnnnnnnnnnnnnnnnnnnnnnnnnnnnnnnnnnnnnnnnnnnnnnnnnnnnnnnnnnnnnnnnnnnnnnnnnnnnnnnnnnnnnnnnnnnnnnnnnnnnnnnnnnnnnnnnnnnnnnnnnnnnnnnnnnnnnnnnnnnnnnnnnnnnnnnnnnnnnnnnnnnnnnnnnnnnnnnnnnnnnnnnnnnnnnnnnnnnnnnnnnnnnnnnnnnnnnnnnnnnnnnnnnnnnnnnnnnnnnnnnnnnnnnnnnnnnnnnnnnnnnnnnnnnnnnnnnnnnnnnnnnnnnnnnnnnnnnnnnnnnnnnnnnnnnnnnnnnnnnnnnnnnnnnnnnnnnnnnnnnnnnnnnnnnnnnnnnnnnnnnnnnnnnnnnnnnnnnnnnnnnnnnnnnnnnnnnnnnnnnnnnnnnnnnnnnnnnnnnnnnnnnnnnnnnnnnnnnnnnnnnnnnnnnnnnnnnnnnnnnnnnnnnnnnnnnnnnnnnnnnnnnnnnnnnnnnnnnnnnnnnnnnnnnnnnnnnnnnnnnnnnnnnnnnnnnnnnnnnnnnnnnnnnnnnnnnnnnnnnnnnnnnnnnnnnnnnnnnnnnnnnnnnnnnnnnnnnnnnnnnnnnnnnnnnnnnnnnnnnnnnnnnnnnnnnnnnnnnnnnnnnnnnnnnnnnnnnnnnnnnnnnnnnnnnnnnnnnnnnnnnnnnnnnnnnnnnnnnnnnnnnnnnnnnnnnnnnnnnnnnnnnnnnnnnnnnnnnnnnnnnnnnnnnnnnnnnnnnnnnnnnnnnnnnnnnnnnnnnnnnnnnnnnnnnnnnnnnnnnnnnnnnnnnnnnnnnnnnnnnnnnnnnnnnnnnnnnnnnnnnnnnnnnnnnnnnnnnnnnnnnnnnnnnnnnnnnnnnnnnnnnnnnnnnnnnnnnnnnnnnnnnnnnnnnnnnnnnnnnnnnnnnnnnnnnnnnnnnnnnnnnnnnnnnnnnnnnnnnnnnnnnnnnnnnnnnnnnnnnnnnnnnnnnnnnnnnnnnnnnnnnnnnnnnnnnnnnnnnnnnnnnnnnnnnnnnnnnnnnnnnnnnnnnnnnnnnnnnnnnnnnnnnnnnnnnnnnnnnnnnnnnnnnnnnnnnnnnnnnnnnnnnnnnnnnnnnnnnnnnnnnnnnnnnnnnnnnnnnnnnnnnnnnnnnnnnnnnnnnnnnnnnnnnnnnnnnnnnnnnnnnnnnnnnnnnnnnnnnnnnnnnnnnnnnnnnnnnnnnnnnnnnnnnnnnnnnnnnnnnnnnnnnnnnnnnnnnnnnnnnnnnnnnnnnnnnnnnnnnnnnnnnnnnnnnnnnnnnnnnnnnnnnnnnnnnnnnnnnnnnnnnnnnnnnnnnnnnnnnnnnnnnnnnnnnnnnnnnnnnnnnnnnnnnnnnnnnnnnnnnnnnnnnnnnnnnnnnnnnnnnnnnnnnnnnnnnnnnnnnnnnnnnnnnnnnnnnnnnnnnnnnnnnnnnnnnnnnnnnnnnnnnnnnnnnnnnnnnnnnnnnnnnnnnnnnnnnnnnnnnnnnnnnnnnnnnnnnnnnnnnnnnnnnnnnnnnnnnnnnnnnnnnnnnnnnnnnnnnnnnnnnnnnnnnnnnnnnnnnnnnnnnnnnnnnnnnnnnnnnnnnnnnnnnnnnnnnnnnnnnnnnnnnnnnnnnnnnnnnnnnnnnnnnnnnnnnnnnnnnnnnnnnnnnnnnnnnnnnnnnnnnnnnnnnnnnnnnnnnnnnnnnnnnnnnnnnnnnnnnnnnnnnnnnnnnnnnnnnnnnnnnnnnnnnnnnnnnnnnnnnnnnnnnnnnnnnnnnnnnnnnnnnnnnnnnnnnnnnnnnnnnnnnnnnnnnnnnnnnnnnnnnnnnnnnnnnnnnnnnnnnnnnnnnnnnnnnnnnnnnnnnnnnnnnnnnnnnnnnnnnnnnnnnnnnnnnnnnnnnnnnnnnnnnnnnnnnnnnnnnnnnnnnnnnnnnnnnnnnnnnnnnnnnnnnnnnnnnnnnnnnnnnnnnnnnnnnnnnnnnnnnnnnnnnnnnnnnnnnnnnnnnnnnnnnnnnnnnnnnnnnnnnnnnnnnnnnnnnnnnnnnnnnnnnnnnnnnnnnnnnnnnnnnnnnnnnnnnnnnnnnnnnnnnnnnnnnnnnnnnnnnnnnnnnnnnnnnnnnnnnnnnnnnnnnnnnnnnnnnnnnnnnnnnnnnnnnnnnnnnnnnnnnnnnnnnnnnnnnnnnnnnnnnnnnnnnnnnnnnnnnnnnnnnnnnnnnnnnnnnnnnnnnnnnnnnnnnnnnnnnnnnnnnnnnnnnnnnnnnnnnnnnnnnnnnnnnnnnnnnnnnnnnnnnnnnnnnnnnnnnnnnnnnnnnnnnnnnnnnnnnnnnnnnnnnnnnnnnnnnnnnnnnnnnnnnnnnnnnnnnnnnnnnnnnnnnnnnnnnnnnnnnnnnnnnnnnnnnnnnnnnnnnnnnnnnnnnnnnnnnnnnnnnnnnnnnnnnnnnnnnnnnnnnnnnnnnnnnnnnnnnnnnnnnnnnnnnnnnnnnnnnnnnnnnnnnnnnnnnnnnnnnnnnnnnnnnnnnnnnnnnnnnnnnnnnnnnnnnnnnnnnnnnnnnnnnnnnnnnnnnnnnnnnnnnnnnnnnnnnnnnnnnnnnnnnnnnnnnnnnnnnnnnnnnnnnnnnnnnnnnnnnnnnnnnnnnnnnnnnnnnnnnnnnnnnnnnnnnnnnnnnnnnnnnnnnnnnnnnnnnnnnnnnnnnnnnnnnnnnnnnnnnnnnnnnnnnnnnnnnnnnnnnnnnnnnnnnnnnnnnnnnnnnnnnnnnnnnnnnnnnnnnnnnnnnnnnnnnnnnnnnnnnnnnnnnnnnnnnnnnnnnnnnnnnnnnnnnnnnnnnnnnnnnnnnnnnnnnnnnnnnnnnnnnnnnnnnnnnnnnnnnnnnnnnnnnnnnnnnnnnnnnnnnnnnnnnnnnnnnnnnnnnnnnnnnnnnnnnnnnnnnnnnnnnnnnnnnnnnnnnnnnnnnnnnnnnnnnnnnnnnnnnnnnnnnnnnnnnnnnnnnnnnnnnnnnnnnnnnnnnnnnnnnnnnnnnnnnnnnnnnnnnnnnnnnnnnnnnnnnnnnnnnnnnnnnnnnnnnnnnnnnnnnnnnnnnnnnnnnnnnnnnnnnnnnnnnnnnnnnnnnnnnnnnnnnnnnnnnnnnnnnnnnnnnnnnnnnnnnnnnnnnnnnnnnnnnnnnnnnnnnnnnnnnnnnnnnnnnnnnnnnnnnnnnnnnnnnnnnnnnnnnnnnnnnnnnnnnnnnnnnnnnnnnnnnnnnnnnnnnnnnnnnnnnnnnnnnnnnnnnnnnnnnnnnnnnnnnnnnnnnnnnnnnnnnnnnnnnnnnnnnnnnnnnnnnnnnnnnnnnnnnnnnnnnnnnnnnnnnnnnnnnnnnnnnnnnnnnnnnnnnnnnnnnnnnnnnnnnnnnnnnnnnnnnnnnnnnnnnnnnnnnnnnnnnnnnnnnnnnnnnnnnnnnnnnnnnnnnnnnnnnnnnnnnnnnnnnnnnnnnnnnnnnnnnnnnnnnnnnnnnnnnnnnnnnnnnnnnnnnnnnnnnnnnnnnnnnnnnnnnnnnnnnnnnnnnnnnnnnnnnnnnnnnnnnnnnnnnnnnnnnnnnnnnnnnnnnnnnnnnnnnnnnnnnnnnnnnnnnnnnnnnnnnnnnnnnnnnnnnnnnnnnnnnnnnnnnnnnnnnnnnnnnnnnnnnnnnnnnnnnnnnnnnnnnnnnnnnnnnnnnnnnnnnnnnnnnnnnnnnnnnnnnnnnnnnnnnnnnnnnnnnnnnnnnnnnnnnnnnnnnnnnnnnnnnnnnnnnnnnnnnnnnnnnnnnnnnnnnnnnnnnnnnnnnnnnnnnnnnnnnnnnnnnnnnnnnnnnnnnnnnnnnnnnnnnnnnnnnnnnnnnnnnnnnnnnnnnnnnnnnnnnnnnnnnnnnnnnnnnnnnnnnnnnnnnnnnnnnnnnnnnnnnnnnnnnnnnnnnnnnnnnnnnnnnnnnnnnnnnnnnnnnnnnnnnnnnnnnnnnnnnnnnnnnnnnnnnnnnnnnnnnnnnnnnnnnnnnnnnnnnnnnnnnnnnnnnnnnnnnnnnnnnnnnnnnnnnnnnnnnnnnnnnnnnnnnnnnnnnnnnnnnnnnnnnnnnnnnnnnnnnnnnnnnnnnnnnnnnnnnnnnnnnnnnnnnnnnnnnnnnnnnnnnnnnnnnnnnnnnnnnnnnnnnnnnnnnnnnnnnnnnnnnnnnnnnnnnnnnnnnnnnnnnnnnnnnnnnnnnnnnnnnnnnnnnnnnnnnnnnnnnnnnnnnnnnnnnnnnnnnnnnnnnnnnnnnnnnnnnnnnnnnnnnnnnnnnnnnnnnnnnnnnnnnnnnnnnnnnnnnnnnnnnnnnnnnnnnnnnnnnnnnnnnnnnnnnnnnnnnnnnnnnnnnnnnnnnnnnnnnnnnnnnnnnnnnnnnnnnnnnnnnnnnnnnnnnnnnnnnnnnnnnnnnnnnnnnnnnnnnnnnnnnnnnnnnnnnnnnnnnnnnnnnnnnnnnnnnnnnnnnnnnnnnnnnnnnnnnnnnnnnnnnnnnnnnnnnnnnnnnnnnnnnnnnnnnnnnnnnnnnnnnnnnnnnnnnnnnnnnnnnnnnnnnnnnnnnnnnnnnnnnnnnnnnnnnnnnnnnnnnnnnnnnnnnnnnnnnnnnnnnnnnnnnnnnnnnnnnnnnnnnnnnnnnnnnnnnnnnnnnnnnnnnnnnnnnnnnnnnnnnnnnnnnnnnnnnnnnnnnnnnnnnnnnnnnnnnnnnnnnnnnnnnnnnnnnnnnnnnnnnnnnnnnnnnnnnnnnnnnnnnnnnnnnnnnnnnnnnnnnnnnnnnnnnnnnnnnnnnnnnnnnnnnnnnnnnnnnnnnnnnnnnnnnnnnnnnnnnnnnnnnnnnnnnnnnnnnnnnnnnnnnnnnnnnnnnnnnnnnnnnnnnnnnnnnnnnnnnnnnnnnnnnnnnnnnnnnnnnnnnnnnnnnnnnnnnnnnnnnnnnnnnnnnnnnnnnnnnnnnnnnnnnnnnnnnnnnnnnnnnnnnnnnnnnnnnnnnnnnnnnnnnnnnnnnnnnnnnnnnnnnnnnnnnnnnnnnnnnnnnnnnnnnnnnnnnnnnnnnnnnnnnnnnnnnnnnnnnnnnnnnnnnnnnnnnnnnnnnnnnnnnnnnnnnnnnnnnnnnnnnnnnnnnnnnnnnnnnnnnnnnnnnnnnnnnnnnnnnnnnnnnnnnnnnnnnnnnnnnnnnnnnnnnnnnnnnnnnnnnnnnnnnnnnnnnnnnnnnnnnnnnnnnnnnnnnnnnnnnnnnnnnnnnnnnnnnnnnnnnnnnnnnnnnnnnnnnnnnnnnnnnnnnnnnnnnnnnnnnnnnnnnnnnnnnnnnnnnnnnnnnnnnnnnnnnnnnnnnnnnnnnnnnnnnnnnnnnnnnnnnnnnnnnnnnnnnnnnnnnnnnnnnnnnnnnnnnnnnnnnnnnnnnnnnnnnnnnnnnnnnnnnnnnnnnnnnnnnnnnnnnnnnnnnnnnnnnnnnnnnnnnnnnnnnnnnnnnnnnnnnnnnnnnnnnnnnnnnnnnnnnnnnnnnnnnnnnnnnnnnnnnnnnnnnnnnnnnnnnnnnnnnnnnnnnnnnnnnnnnnnnnnnnnnnnnnnnnnnnnnnnnnnnnnnnnnnnnnnnnnnnnnnnnnnnnnnnnnnnnnnnnnnnnnnnnnnnnnnnnnnnnnnnnnnnnnnnnnnnnnnnnnnnnnnnnnnnnnnnnnnnnnnnnnnnnnnnnnnnnnnnnnnnnnnnnnnnnnnnnnnnnnnnnnnnnnnnnnnnnnnnnnnnnnnnnnnnnnnnnnnnnnnnnnnnnnnnnnnnnnnnnnnnnnnnnnnnnnnnnnnnnnnnnnnnnnnnnnnnnnnnnnnnnnnnnnnnnnnnnnnnnnnnnnnnnnnnnnnnnnnnnnnnnnnnnnnnnnnnnnnnnnnnnnnnnnnnnnnnnnnnnnnnnnnnnnnnnnnnnnnnnnnnnnnnnnnnnnnnnnnnnnnnnnnnnnnnnnnnnnnnnnnnnnnnnnnnnnnnnnnnnnnnnnnnnnnnnnnnnnnnnnnnnnnnnnnnnnnnnnnnnnnnnnnnnnnnnnnnnnnnnnnnnnnnnnnnnnnnnnnnnnnnnnnnnnnnnnnnnnnnnnnnnnnnnnnnnnnnnnnnnnnnnnnnnnnnnnnnnnnnnnnnnnnnnnnnnnnnnnnnnnnnnnnnnnnnnnnnnnnnnnnnnnnnnnnnnnnnnnnnnnnnnnnnnnnnnnnnnnnnnnnnnnnnnnnnnnnnnnnnnnnnnnnnnnnnnnnnnnnnnnnnnnnnnnnnnnnnnnnnnnnnnnnnnnnnnnnnnnnnnnnnnnnnnnnnnnnnnnnnnnnnnnnnnnnnnnnnnnnnnnnnnnnnnnnnnnnnnnnnnnnnnnnnnnnnnnnnnnnnnnnnnnnnnnnnnnnnnnnnnnnnnnnnnnnnnnnnnnnnnnnnnnnnnnnnnnnnnnnnnnnnnnnnnnnnnnnnnnnnnnnnnnnnnnnnnnnnnnnnnnnnnnnnnnnnnnnnnnnnnnnnnnnnnnnnnnnnnnnnnnnnnnnnnnnnnnnnnnnnnnnnnnnnnnnnnnnnnnnnnnnnnnnnnnnnnnnnnnnnnnnnnnnnnnnnnnnnnnnnnnnnnnnnnnnnnnnnnnnnnnnnnnnnnnnnnnnnnnnnnnnnnnnnnnnnnnnnnnnnnnnnnnnnnnnnnnnnnnnnnnnnnnnnnnnnnnnnnnnnnnnnnnnnnnnnnnnnnnnnnnnnnnnnnnnnnnnnnnnnnnnnnnnnnnnnnnnnnnnnnnnnnnnnnnnnnnnnnnnnnnnnnnnnnnnnnnnnnnnnnnnnnnnnnnnnnnnnnnnnnnnnnnnnnnnnnnnnnnnnnnnnnnnnnnnnnnnnnnnnnnnnnnnnnnnnnnnnnnnnnnnnnnnnnnnnnnnnnnnnnnnnnnnnnnnnnnnnnnnnnnnnnnnnnnnnnnnnnnnnnnnnnnnnnnnnnnnnnnnnnnnnnnnnnnnnnnnnnnnnnnnnnnnnnnnnnnnnnnnnnnnnnnnnnnnnnnnnnnnnnnnnnnnnnnnnnnnnnnnnnnnnnnnnnnnnnnnnnnnnnnnnnnnnnnnnnnnnnnnnnnnnnnnnnnnnnnnnnnnnnnnnnnnnnnnnnnnnnnnnnnnnnnnnnnnnnnnnnnnnnnnnnnnnnnnnnnnnnnnnnnnnnnnnnnnnnnnnnnnnnnnnnnnnnnnnnnnnnnnnnnnnnnnnnnnnnnnnnnnnnnnnnnnnnnnnnnnnnnnnnnnnnnnnnnnnnnnnnnnnnnnnnnnnnnnnnnnnnnnnnnnnnnnnnnnnnnnnnnnnnnnnnnnnnnnnnnnnnnnnnnnnnnnnnnnnnnnnnnnnnnnnnnnnnnnnnnnnnnnnnnnnnnnnnnnnnnnnnnnnnnnnnnnnnnnnnnnnnnnnnnnnnnnnnnnnnnnnnnnnnnnnnnnnnnnnnnnnnnnnnnnnnnnnnnnnnnnnnnnnnnnnnnnnnnnnnnnnnnnnnnnnnnnnnnnnnnnnnnnnnnnnnnnnnnnnnnnnnnnnnnnnnnnnnnnnnnnnnnnnnnnnnnnnnnnnnnnnnnnnnnnnnnnnnnnnnnnnnnnnnnnnnnnnnnnnnnnnnnnnnnnnnnnnnnnnnnnnnnnnnnnnnnnnnnnnnnnnnnnnnnnnnnnnnnnnnnnnnnnnnnnnnnnnnnnnnnnnnnnnnnnnnnnnnnnnnnnnnnnnnnnnnnnnnnnnnnnnnnnnnnnnnnnnnnnnnnnnnnnnnnnnnnnnnnnnnnnnnnnnnnnnnnnnnnnnnnnnnnnnnnnnnnnnnnnnnnnnnnnnnnnnnnnnnnnnnnnnnnnnnnnnnnnnnnnnnnnnnnnnnnnnnnnnnnnnnnnnnnnnnnnnnnnnnnnnnnnnnnnnnnnnnnnnnnnnnnnnnnnnnnnnnnnnnnnnnnnnnnnnnnnnnnnnnnnnnnnnnnnnnnnnnnnnnnnnnnnnnnnnnnnnnnnnnnnnnnnnnnnnnnnnnnnnnnnnnnnnnnnnnnnnnnnnnnnnnnnnnnnnnnnnnnnnnnnnnnnnnnnnnnnnnnnnnnnnnnnnnnnnnnnnnnnnnnnnnnnnnnnnnnnnnnnnnnnnnnnnnnnnnnnnnnnnnnnnnnnnnnnnnnnnnnnnnnnnnnnnnnnnnnnnnnnnnnnnnnnnnnnnnnnnnnnnnnnnnnnnnnnnnnnnnnnnnnnnnnnnnnnnnnnnnnnnnnnnnnnnnnnnnnnnnnnnnnnnnnnnnnnnnnnnnnnnnnnnnnnnnnnnnnnnnnnnnnnnnnnnnnnnnnnnnnnnnnnnnnnnnnnnnnnnnnnnnnnnnnnnnnnnnnnnnnnnnnnnnnnnnnnnnnnnnnnnnnnnnnnnnnnnnnnnnnnnnnnnnnnnnnnnnnnnnnnnnnnnnnnnnnnnnnnnnnnnnnnnnnnnnnnnnnnnnnnnnnnnnnnnnnnnnnnnnnnnnnnnnnnnnnnnnnnnnnnnnnnnnnnnnnnnnnnnnnnnnnnnnnnnnnnnnnnnnnnnnnnnnnnnnnnnnnnnnnnnnnnnnnnnnnnnnnnnnnnnnnnnnnnnnnnnnnnnnnnnnnnnnnnnnnnnnnnnnnnnnnnnnnnnnnnnnnnnnnnnnnnnnnnnnnnnnnnnnnnnnnnnnnnnnnnnnnnnnnnnnnnnnnnnnnnnnnnnnnnnnnnnnnnnnnnnnnnnnnnnnnnnnnnnnnnnnnnnnnnnnnnnnnnnnnnnnnnnnnnnnnnnnnnnnnnnnnnnnnnnnnnnnnnnnnnnnnnnnnnnnnnnnnnnnnnnnnnnnnnnnnnnnnnnnnnnnnnnnnnnnnnnnnnnnnnnnnnnnnnnnnnnnnnnnnnnnnnnnnnnnnnnnnnnnnnnnnnnnnnnnnnnnnnnnnnnnnnnnnnnnnnnnnnnnnnnnnnnnnnnnnnnnnnnnnnnnnnnnnnnnnnnnnnnnnnnnnnnnnnnnnnnnnnnnnnnnnnnnnnnnnnnnnnnnnnnnnnnnnnnnnnnnnnnnnnnnnnnnnnnnnnnnnnnnnnnnnnnnnnnnnnnnnnnnnnnnnnnnnnnnnnnnnnnnnnnnnnnnnnnnnnnnnnnnnnnnnnnnnnnnnnnnnnnnnnnnnnnnnnnnnnnnnnnnnnnnnnnnnnnnnnnnnnnnnnnnnnnnnnnnnnnnnnnnnnnnnnnnnnnnnnnnnnnnnnnnnnnnnnnnnnnnnnnnnnnnnnnnnnnnnnnnnnnnnnnnnnnnnnnnnnnnnnnnnnnnnnnnnnnnnnnnnnnnnnnnnnnnnnnnnnnnnnnnnnnnnnnnnnnnnnnnnnnnnnnnnnnnnnnnnnnnnnnnnnnnnnnnnnnnnnnnnnnnnnnnnnnnnnnnnnnnnnnnnnnnnnnnnnnnnnnnnnnnnnnnnnnnnnnnnnnnnnnnnnnnnnnnnnnnnnnnnnnnnnnnnnnnnnnnnnnnnnnnnnnnnnnnnnnnnnnnnnnnnnnnnnnnnnnnnnnnnnnnnnnnnnnnnnnnnnnnnnnnnnnnnnnnnnnnnnnnnnnnnnnnnnnnnnnnnnnnnnnnnnnnnnnnnnnnnnnnnnnnnnnnnnnnnnnnnnnnnnnnnnnnnnnnnnnnnnnnnnnnnnnnnnnnnnnnnnnnnnnnnnnnnnnnnnnnnnnnnnnnnnnnnnnnnnnnnnnnnnnnnnnnnnnnnnnnnnnnnnnnnnnnnnnnnnnnnnnnnnnnnnnnnnnnnnnnnnnnnnnnnnnnnnnnnnnnnnnnnnnnnnnnnnnnnnnnnnnnnnnnnnnnnnnnnnnnnnnnnnnnnnnnnnnnnnnnnnnnnnnnnnnnnnnnnnnnnnnnnnnnnnnnnnnnnnnnnnnnnnnnnnnnnnnnnnnnnnnnnnnnnnnnnnnnnnnnnnnnnnnnnnnnnnnnnnnnnnnnnnnnnnnnnnnnnnnnnnnnnnnnnnnnnnnnnnnnnnnnnnnnnnnnnnnnnnnnnnnnnnnnnnnnnnnnnnnnnnnnnnnnnnnnnnnnnnnnnnnnnnnnnnnnnnnnnnnnnnnnnnnnnnnnnnnnnnnnnnnnnnnnnnnnnnnnnnnnnnnnnnnnnnnnnnnnnnnnnnnnnnnnnnnnnnnnnnnnnnnnnnnnnnnnnnnnnnnnnnnnnnnnnnnnnnnnnnnnnnnnnnnnnnnnnnnnnnnnnnnnnnnnnnnnnnnnnnnnnnnnnnnnnnnnnnnnnnnnnnnnnnnnnnnnnnnnnnnnnnnnnnnnnnnnnnnnnnnnnnnnnnnnnnnnnnnnnnnnnnnnnnnnnnnnnnnnnnnnnnnnnnnnnnnnnnnnnnnnnnnnnnnnnnnnnnnnnnnnnnnnnnnnnnnnnnnnnnnnnnnnnnnnnnnnnnnnnnnnnnnnnnnnnnnnnnnnnnnnnnnnnnnnnnnnnnnnnnnnnnnnnnnnnnnnnnnnnnnnnnnnnnnnnnnnnnnnnnnnnnnnnnnnnnnnnnnnnnnnnnnnnnnnnnnnnnnnnnnnnnnnnnnnnnnnnnnnnnnnnnnnnnnnnnnnnnnnnnnnnnnnnnnnnnnnnnnnnnnnnnnnnnnnnnnnnnnnnnnnnnnnnnnnnnnnnnnnnnnnnnnnnnnnnnnnnnnnnnnnnnnnnnnnnnnnnnnnnnnnnnnnnnnnnnnnnnnnnnnnnnnnnnnnnnnnnnnnnnnnnnnnnnnnnnnnnnnnnnnnnnnnnnnnnnnnnnnnnnnnnnnnnnnnnnnnnnnnnnnnnnnnnnnnnnnnnnnnnnnnnnnnnnnnnnnnnnnnnnnnnnnnnnnnnnnnnnnnnnnnnnnnnnnnnnnnnnnnnnnnnnnnnnnnnnnnnnnnnnnnnnnnnnnnnnnnnnnnnnnnnnnnnnnnnnnnnnnnnnnnnnnnnnnnnnnnnnnnnnnnnnnnnnnnnnnnnnnnnnnnnnnnnnnnnnnnnnnnnnnnnnnnnnnnnnnnnnnnnnnnnnnnnnnnnnnnnnnnnnnnnnnnnnnnnnnnnnnnnnnnnnnnnnnnnnnnnnnnnnnnnnnnnnnnnnnnnnnnnnnnnnnnnnnnnnnnnnnnnnnnnnnnnnnnnnnnnnnnnnnnnnnnnnnnnnnnnnnnnnnnnnnnnnnnnnnnnnnnnnnnnnnnnnnnnnnnnnnnnnnnnnnnnnnnnnnnnnnnnnnnnnnnnnnnnnnnnnnnnnnnnnnnnnnnnnnnnnnnnnnnnnnnnnnnnnnnnnnnnnnnnnnnnnnnnnnnnnnnnnnnnnnnnnnnnnnnnnnnnnnnnnnnnnnnnnnnnnnnnnnnnnnnnnnnnnnnnnnnnnnnnnnnnnnnnnnnnnnnnnnnnnnnnnnnnnnnnnnnnnnnnnnnnnnnnnnnnnnnnnnnnnnnnnnnnnnnnnnnnnnnnnnnnnnnnnnnnnnnnnnnnnnnnnnnnnnnnnnnnnnnnnnnnnnnnnnnnnnnnnnnnnnnnnnnnnnnnnnnnnnnnnnnnnnnnnnnnnnnnnnnnnnnnnnnnnnnnnnnnnnnnnnnnnnnnnnnnnnnnnnnnnnnnnnnnnnnnnnnnnnnnnnnnnnnnnnnnnnnnnnnnnnnnnnnnnnnnnnnnnnnnnnnnnnnnnnnnnnnnnnnnnnnnnnnnnnnnnnnnnnnnnnnnnnnnnnnnnnnnnnnnnnnnnnnnnnnnnnnnnnnnnnnnnnnnnnnnnnnnnnnnnnnnnnnnnnnnnnnnnnnnnnnnnnnnnnnnnnnnnnnnnnnnnnnnnnnnnnnnnnnnnnnnnnnnnnnnnnnnnnnnnnnnnnnnnnnnnnnnnnnnnnnnnnnnnnnnnnnnnnnnnnnnnnnnnnnnnnnnnnnnnnnnnnnnnnnnnnnnnnnnnnnnnnnnnnnnnnnnnnnnnnnnnnnnnnnnnnnnnnnnnnnnnnnnnnnnnnnnnnnnnnnnnnnnnnnnnnnnnnnnnnnnnnnnnnnnnnnnnnnnnnnnnnnnnnnnnnnnnnnnnnnnnnnnnnnnnnnnnnnnnnnnnnnnnnnnnnnnnnnnnnnnnnnnnnnnnnnnnnnnnnnnnnnnnnnnnnnnnnnnnnnnnnnnnnnnnnnnnnnnnnnnnnnnnnnnnnnnnnnnnnnnnnnnnnnnnnnnnnnnnnnnnnnnnnnnnnnnnnnnnnnnnnnnnnnnnnnnnnnnnnnnnnnnnnnnnnnnnnnnnnnnnnnnnnnnnnnnnnnnnnnnnnnnnnnnnnnnnnnnnnnnnnnnnnnnnnnnnnnnnnnnnnnnnnnnnnnnnnnnnnnnnnnnnnnnnnnnnnnnnnnnnnnnnnnnnnnnnnnnnnnnnnnnnnnnnnnnnnnnnnnnnnnnnnnnnnnnnnnnnnnnnnnnnnnnnnnnnnnnnnnnnnnnnnnnnnnnnnnnnnnnnnnnnnnnnnnnnnnnnnnnnnnnnnnnnnnnnnnnnnnnnnnnnnnnnnnnnnnnnnnnnnnnnnnnnnnnnnnnnnnnnnnnnnnnnnnnnnnnnnnnnnnnnnnnnnnnnnnnnnnnnnnnnnnnnnnnnnnnnnnnnnnnnnnnnnnnnnnnnnnnnnnnnnnnnnnnnnnnnnnnnnnnnnnnnnnnnnnnnnnnnnnnnnnnnnnnnnnnnnnnnnnnnnnnnnnnnnnnnnnnnnnnnnnnnnnnnnnnnnnnnnnnnnnnnnnnnnnnnnnnnnnnnnnnnnnnnnnnnnnnnnnnnnnnnnnnnnnnnnnnnnnnnnnnnnnnnnnnnnnnnnnnnnnnnnnnnnnnnnnnnnnnnnnnnnnnnnnnnnnnnnnnnnnnnnnnnnnnnnnnnnnnnnnnnnnnnnnnnnnnnnnnnnnnnnnnnnnnnnnnnnnnnnnnnnnnnnnnnnnnnnnnnnnnnnnnnnnnnnnnnnnnnnnnnnnnnnnnnnnnnnnnnnnnnnnnnnnnnnnnnnnnnnnnnnnnnnnnnnnnnnnnnnnnnnnnnnnnnnnnnnnnnnnnnnnnnnnnnnnnnnnnnnnnnnnnnnnnnnnnnnnnnnnnnnnnnnnnnnnnnnnnnnnnnnnnnnnnnnnnnnnnnnnnnnnnnnnnnnnnnnnnnnnnnnnnnnnnnnnnnnnnnnnnnnnnnnnnnnnnnnnnnnnnnnnnnnnnnnnnnnnnnnnnnnnnnnnnnnnnnnnnnnnnnnnnnnnnnnnnnnnnnnnnnnnnnnnnnnnnnnnnnnnnnnnnnnnnnnnnnnnnnnnnnnnnnnnnnnnnnnnnnnnnnnnnnnnnnnnnnnnnnnnnnnnnnnnnnnnnnnnnnnnnnnnnnnnnnnnnnnnnnnnnnnnnnnnnnnnnnnnnnnnnnnnnnnnnnnnnnnnnnnnnnnnnnnnnnnnnnnnnnnnnnnnnnnnnnnnnnnnnnnnnnnnnnnnnnnnnnnnnnnnnnnnnnnnnnnnnnnnnnnnnnnnnnnnnnnnnnnnnnnnnnnnnnnnnnnnnnnnnnnnnnnnnnnnnnnnnnnnnnnnnnnnnnnnnnnnnnnnnnnnnnnnnnnnnnnnnnnnnnnnnnnnnnnnnnnnnnnnnnnnnnnnnnnnnnnnnnnnnnnnnnnnnnnnnnnnnnnnnnnnnnnnnnnnnnnnnnnnnnnnnnnnnnnnnnnnnnnnnnnnnnnnnnnnnnnnnnnnnnnnnnnnnnnnnnnnnnnnnnnnnnnnnnnnnnnnnnnnnnnnnnnnnnnnnnnnnnnnnnnnnnnnnnnnnnnnnnnnnnnnnnnnnnnnnnnnnnnnnnnnnnnnnnnnnnnnnnnnnnnnnnnnnnnnnnnnnnnnnnnnnnnnnnnnnnnnnnnnnnnnnnnnnnnnnnnnnnnnnnnnnnnnnnnnnnnnnnnnnnnnnnnnnnnnnnnnnnnnnnnnnnnnnnnnnnnnnnnnnnnnnnnnnnnnnnnnnnnnnnnnnnnnnnnnnnnnnnnnnnnnnnnnnnnnnnnnnnnnnnnnnnnnnnnnnnnnnnnnnnnnnnnnnnnnnnnnnnnnnnnnnnnnnnnnnnnnnnnnnnnnnnnnnnnnnnnnnnnnnnnnnnnnnnnnnnnnnnnnnnnnnnnnnnnnnnnnnnnnnnnnnnnnnnnnnnnnnnnnnnnnnnnnnnnnnnnnnnnnnnnnnnnnnnnnnnnnnnnnnnnnnnnnnnnnnnnnnnnnnnnnnnnnnnnnnnnnnnnnnnnnnnnnnnnnnnnnnnnnnnnnnnnnnnnnnnnnnnnnnnnnnnnnnnnnnnnnnnnnnnnnnnnnnnnnnnnnnnnnnnnnnnnnnnnnnnnnnnnnnnnnnnnnnnnnnnnnnnnnnnnnnnnnnnnnnnnnnnnnnnnnnnnnnnnnnnnnnnnnnnnnnnnnnnnnnnnnnnnnnnnnnnnnnnnnnnnnnnnnnnnnnnnnnnnnnnnnnnnnnnnnnnnnnnnnnnnnnnnnnnnnnnnnnnnnnnnnnnnnnnnnnnnnnnnnnnnnnnnnnnnnnnnnnnnnnnnnnnnnnnnnnnnnnnnnnnnnnnnnnnnnnnnnnnnnnnnnnnnnnnnnnnnnnnnnnnnnnnnnnnnnnnnnnnnnnnnnnnnnnnnnnnnnnnnnnnnnnnnnnnnnnnnnnnnnnnnnnnnnnnnnnnnnnnnnnnnnnnnnnnnnnnnnnnnnnnnnnnnnnnnnnnnnnnnnnnnnnnnnnnnnnnnnnnnnnnnnnnnnnnnnnnnnnnnnnnnnnnnnnnnnnnnnnnnnnnnnnnnnnnnnnnnnnnnnnnnnnnnnnnnnnnnnnnnnnnnnnnnnnnnnnnnnnnnnnnnnnnnnnnnnnnnnnnnnnnnnnnnnnnnnnnnnnnnnnnnnnnnnnnnnnnnnnnnnnnnnnnnnnnnnnnnnnnnnnnnnnnnnnnnnnnnnnnnnnnnnnnnnnnnnnnnnnnnnnnnnnnnnnnnnnnnnnnnnnnnnnnnnnnnnnnnnnnnnnnnnnnnnnnnnnnnnnnnnnnnnnnnnnnnnnnnnnnnnnnnnnnnnnnnnnnnnnnnnnnnnnnnnnnnnnnnnnnnnnnnnnnnnnnnnnnnnnnnnnnnnnnnnnnnnnnnnnnnnnnnnnnnnnnnnnnnnnnnnnnnnnnnnnnnnnnnnnnnnnnnnnnnnnnnnnnnnnnnnnnnnnnnnnnnnnnnnnnnnnnnnnnnnnnnnnnnnnnnnnnnnnnnnnnnnnnnnnnnnnnnnnnnnnnnnnnnnnnnnnnnnnnnnnnnnnnnnnnnnnnnnnnnnnnnnnnnnnnnnnnnnnnnnnnnnnnnnnnnnnnnnnnnnnnnnnnnnnnnnnnnnnnnnnnnnnnnnnnnnnnnnnnnnnnnnnnnnnnnnnnnnnnnnnnnnnnnnnnnnnnnnnnnnnnnnnnnnnnnnnnnnnnnnnnnnnnnnnnnnnnnnnnnnnnnnnnnnnnnnnnnnnnnnnnnnnnnnnnnnnnnnnnnnnnnnnnnnnnnnnnnnnnnnnnnnnnnnnnnnnnnnnnnnnnnnnnnnnnnnnnnnnnnnnnnnnnnnnnnnnnnnnnnnnnnnnnnnnnnnnnnnnnnnnnnnnnnnnnnnnnnnnnnnnnnnnnnnnnnnnnnnnnnnnnnnnnnnnnnnnnnnnnnnnnnnnnnnnnnnnnnnnnnnnnnnnnnnnnnnnnnnnnnnnnnnnnnnnnnnnnnnnnnnnnnnnnnnnnnnnnnnnnnnnnnnnnnnnnnnnnnnnnnnnnnnnnnnnnnnnnnnnnnnnnnnnnnnnnnnnnnnnnnnnnnnnnnnnnnnnnnnnnnnnnnnnnnnnnnnnnnnnnnnnnnnnnnnnnnnnnnnnnnnnnnnnnnnnnnnnnnnnnnnnnnnnnnnnnnnnnnnnnnnnnnnnnnnnnnnnnnnnnnnnnnnnnnnnnnnnnnnnnnnnnnnnnnnnnnnnnnnnnnnnnnnnnnnnnnnnnnnnnnnnnnnnnnnnnnnnnnnnnnnnnnnnnnnnnnnnnnnnnnnnnnnnnnnnnnnnnnnnnnnnnnnnnnnnnnnnnnnnnnnnnnnnnnnnnnnnnnnnnnnnnnnnnnnnnnnnnnnnnnnnnnnnnnnnnnnnnnnnnnnnnnnnnnnnnnnnnnnnnnnnnnnnnnnnnnnnnnnnnnnnnnnnnnnnnnnnnnnnnnnnnnnnnnnnnnnnnnnnnnnnnnnnnnnnnnnnnnnnnnnnnnnnnnnnnnnnnnnnnnnnnnnnnnnnnnnnnnnnnnnnnnnnnnnnnnnnnnnnnnnnnnnnnnnnnnnnnnnnnnnnnnnnnnnnnnnnnnnnnnnnnnnnnnnnnnnnnnnnnnnnnnnnnnnnnnnnnnnnnnnnnnnnnnnnnnnnnnnnnnnnnnnnnnnnnnnnnnnnnnnnnnnnnnnnnnnnnnnnnnnnnnnnnnnnnnnnnnnnnnnnnnnnnnnnnnnnnnnnnnnnnnnnnnnnnnnnnnnnnnnnnnnnnnnnnnnnnnnnnnnnnnnnnnnnnnnnnnnnnnnnnnnnnnnnnnnnnnnnnnnnnnnnnnnnnnnnnnnnnnnnnnnnnnnnnnnnnnnnnnnnnnnnnnnnnnnnnnnnnnnnnnnnnnnnnnnnnnnnnnnnnnnnnnnnnnnnnnnnnnnnnnnnnnnnnnnnnnnnnnnnnnnnnnnnnnnnnnnnnnnnnnnnnnnnnnnnnnnnnnnnnnnnnnnnnnnnnnnnnnnnnnnnnnnnnnnnnnnnnnnnnnnnnnnnnnnnnnnnnnnnnnnnnnnnnnnnnnnnnnnnnnnnnnnnnnnnnnnnnnnnnnnnnnnnnnnnnnnnnnnnnnnnnnnnnnnnnnnnnnnnnnnnnnnnnnnnnnnnnnnnnnnnnnnnnnnnnnnnnnnnnnnnnnnnnnnnnnnnnnnnnnnnnnnnnnnnnnnnnnnnnnnnnnnnnnnnnnnnnnnnnnnnnnnnnnnnnnnnnnnnnnnnnnnnnnnnnnnnnnnnnnnnnnnnnnnnnnnnnnnnnnnnnnnnnnnnnnnnnnnnnnnnnnnnnnnnnnnnnnnnnnnnnnnnnnnnnnnnnnnnnnnnnnnnnnnnnnnnnnnnnnnnnnnnnnnnnnnnnnnnnnnnnnnnnnnnnnnnnnnnnnnnnnnnnnnnnnnnnnnnnnnnnnnnnnnnnnnnnnnnnnnnnnnnnnnnnnnnnnnnnnnnnnnnnnnnnnnnnnnnnnnnnnnnnnnnnnnnnnnnnnnnnnnnnnnnnnnnnnnnnnnnnnnnnnnnnnnnnnnnnnnnnnnnnnnnnnnnnnnnnnnnnnnnnnnnnnnnnnnnnnnnnnnnnnnnnnnnnnnnnnnnnnnnnnnnnnnnnnnnnnnnnnnnnnnnnnnnnnnnnnnnnnnnnnnnnnnnnnnnnnnnnnnnnnnnnnnnnnnnnnnnnnnnnnnnnnnnnnnnnnnnnnnnnnnnnnnnnnnnnnnnnnnnnnnnnnnnnnnnnnnnnnnnnnnnnnnnnnnnnnnnnnnnnnnnnnnnnnnnnnnnnnnnnnnnnnnnnnnnnnnnnnnnnnnnnnnnnnnnnnnnnnnnnnnnnnnnnnnnnnnnnnnnnnnnnnnnnnnnnnnnnnnnnnnnnnnnnnnnnnnnnnnnnnnnnnnnnnnnnnnnnnnnnnnnnnnnnnnnnnnnnnnnnnnnnnnnnnnnnnnnnnnnnnnnnnnnnnnnnnnnnnnnnnnnnnnnnnnnnnnnnnnnnnnnnnnnnnnnnnnnnnnnnnnnnnnnnnnnnnnnnnnnnnnnnnnnnnnnnnnnnnnnnnnnnnnnnnnnnnnnnnnnnnnnnnnnnnnnnnnnnnnnnnnnnnnnnnnnnnnnnnnnnnnnnnnnnnnnnnnnnnnnnnnnnnnnnnnnnnnnnnnnnnnnnnnnnnnnnnnnnnnnnnnnnnnnnnnnnnnnnnnnnnnnnnnnnnnnnnnnnnnnnnnnnnnnnnnnnnnnnnnnnnnnnnnnnnnnnnnnnnnnnnnnnnnnnnnnnnnnnnnnnnnnnnnnnnnnnnnnnnnnnnnnnnnnnnnnnnnnnnnnnnnnnnnnnnnnnnnnnnnnnnnnnnnnnnnnnnnnnnnnnnnnnnnnnnnnnnnnnnnnnnnnnnnnnnnnnnnnnnnnnnnnnnnnnnnnnnnnnnnnnnnnnnnnnnnnnnnnnnnnnnnnnnnnnnnnnnnnnnnnnnnnnnnnnnnnnnnnnnnnnnnnnnnnnnnnnnnnnnnnnnnnnnnnnnnnnnnnnnnnnnnnnnnnnnnnnnnnnnnnnnnnnnnnnnnnnnnnnnnnnnnnnnnnnnnnnnnnnnnnnnnnnnnnnnnnnnnnnnnnnnnnnnnnnnnnnnnnnnnnnnnnnnnnnnnnnnnnnnnnnnnnnnnnnnnnnnnnnnnnnnnnnnnnnnnnnnnnnnnnnnnnnnnnnnnnnnnnnnnnnnnnnnnnnnnnnnnnnnnnnnnnnnnnnnnnnnnnnnnnnnnnnnnnnnnnnnnnnnnnnnnnnnnnnnnnnnnnnnnnnnnnnnnnnnnnnnnnnnnnnnnnnnnnnnnnnnnnnnnnnnnnnnnnnnnnnnnnnnnnnnnnnnnnnnnnnnnnnnnnnnnnnnnnnnnnnnnnnnnnnnnnnnnnnnnnnnnnnnnnnnnnnnnnnnnnnnnnnnnnnnnnnnnnnnnnnnnnnnnnnnnnnnnnnnnnnnnnnnnnnnnnnnnnnnnnnnnnnnnnnnnnnnnnnnnnnnnnnnnnnnnnnnnnnnnnnnnnnnnnnnnnnnnnnnnnnnnnnnnnnnnnnnnnnnnnnnnnnnnnnnnnnnnnnnnnnnnnnnnnnnnnnnnnnnnnnnnnnnnnnnnnnnnnnnnnnnnnnnnnnnnnnnnnnnnnnnnnnnnnnnnnnnnnnnnnnnnnnnnnnnnnnnnnnnnnnnnnnnnnnnnnnnnnnnnnnnnnnnnnnnnnnnnnnnnnnnnnnnnnnnnnnnnnnnnnnnnnnnnnnnnnnnnnnnnnnnnnnnnnnnnnnnnnnnnnnnnnnnnnnnnnnnnnnnnnnnnnnnnnnnnnnnnnnnnnnnnnnnnnnnnnnnnnnnnnnnnnnnnnnnnnnnnnnnnnnnnnnnnnnnnnnnnnnnnnnnnnnnnnnnnnnnnnnnnnnnnnnnnnnnnnnnnnnnnnnnnnnnnnnnnnnnnnnnnnnnnnnnnnnnnnnnnnnnnnnnnnnnnnnnnnnnnnnnnnnnnnnnnnnnnnnnnnnnnnnnnnnnnnnnnnnnnnnnnnnnnnnnnnnnnnnnnnnnnnnnnnnnnnnnnnnnnnnnnnnnnnnnnnnnnnnnnnnnnnnnnnnnnnnnnnnnnnnnnnnnnnnnnnnnnnnnnnnnnnnnnnnnnnnnnnnnnnnnnnnnnnnnnnnnnnnnnnnnnnnnnnnnnnnnnnnnnnnnnnnnnnnnnnnnnnnnnnnnnnnnnnnnnnnnnnnnnnnnnnnnnnnnnnnnnnnnnnnnnnnnnnnnnnnnnnnnnnnnnnnnnnnnnnnnnnnnnnnnnnnnnnnnnnnnnnnnnnnnnnnnnnnnnnnnnnnnnnnnnnnnnnnnnnnnnnnnnnnnnnnnnnnnnnnnnnnnnnnnnnnnnnnnnnnnnnnnnnnnnnnnnnnnnnnnnnnnnnnnnnnnnnnnnnnnnnnnnnnnnnnnnnnnnnnnnnnnnnnnnnnnnnnnnnnnnnnnnnnnnnnnnnnnnnnnnnnnnnnnnnnnnnnnnnnnnnnnnnnnnnnnnnnnnnnnnnnnnnnnnnnnnnnnnnnnnnnnnnnnnnnnnnnnnnnnnnnnnnnnnnnnnnnnnnnnnnnnnnnnnnnnnnnnnnnnnnnnnnnnnnnnnnnnnnnnnnnnnnnnnnnnnnnnnnnnnnnnnnnnnnnnnnnnnnnnnnnnnnnnnnnnnnnnnnnnnnnnnnnnnnnnnnnnnnnnnnnnnnnnnnnnnnnnnnnnnnnnnnnnnnnnnnnnnnnnnnnnnnnnnnnnnnnnnnnnnnnnnnnnnnnnnnnnnnnnnnnnnnnnnnnnnnnnnnnnnnnnnnnnnnnnnnnnnnnnnnnnnnnnnnnnnnnnnnnnnnnnnnnnnnnnnnnnnnnnnnnnnnnnnnnnnnnnnnnnnnnnnnnnnnnnnnnnnnnnnnnnnnnnnnnnnnnnnnnnnnnnnnnnnnnnnnnnnnnnnnnnnnnnnnnnnnnnnnnnnnnnnnnnnnnnnnnnnnnnnnnnnnnnnnnnnnnnnnnnnnnnnnnnnnnnnnnnnnnnnnnnnnnnnnnnnnnnnnnnnnnnnnnnnnnnnnnnnnnnnnnnnnnnnnnnnnnnnnnnnnnnnnnnnnnnnnnnnnnnnnnnnnnnnnnnnnnnnnnnnnnnnnnnnnnnnnnnnnnnnnnnnnnnnnnnnnnnnnnnnnnnnnnnnnnnnnnnnnnnnnnnnnnnnnnnnnnnnnnnnnnnnnnnnnnnnnnnnnnnnnnnnnnnnnnnnnnnnnnnnnnnnnnnnnnnnnnnnnnnnnnnnnnnnnnnnnnnnnnnnnnnnnnnnnnnnnnnnnnnnnnnnnnnnnnnnnnnnnnnnnnnnnnnnnnnnnnnnnnnnnnnnnnnnnnnnnnnnnnnnnnnnnnnnnnnnnnnnnnnnnnnnnnnnnnnnnnnnnnnnnnnnnnnnnnnnnnnnnnnnnnnnnnnnnnnnnnnnnnnnnnnnnnnnnnnnnnnnnnnnnnnnnnnnnnnnnnnnnnnnnnnnnnnnnnnnnnnnnnnnnnnnnnnnnnnnnnnnnnnnnnnnnnnnnnnnnnnnnnnnnnnnnnnnnnnnnnnnnnnnnnnnnnnnnnnnnnnnnnnnnnnnnnnnnnnnnnnnnnnnnnnnnnnnnnnnnnnnnnnnnnnnnnnnnnnnnnnnnnnnnnnnnnnnnnnnnnnnnnnnnnnnnnnnnnnnnnnnnnnnnnnnnnnnnnnnnnnnnnnnnnnnnnnnnnnnnnnnnnnnnnnnnnnnnnnnnnnnnnnnnnnnnnnnnnnnnnnnnnnnnnnnnnnnnnnnnnnnnnnnnnnnnnnnnnnnnnnnnnnnnnnnnnnnnnnnnnnnnnnnnnnnnnnnnnnnnnnnnnnnnnnnnnnnnnnnnnnnnnnnnnnnnnnnnnnnnnnnnnnnnnnnnnnnnnnnnnnnnnnnnnnnnnnnnnnnnnnnnnnnnnnnnnnnnnnnnnnnnnnnnnnnnnnnnnnnnnnnnnnnnnnnnnnnnnnnnnnnnnnnnnnnnnnnnnnnnnnnnnnnnnnnnnnnnnnnnnnnnnnnnnnnnnnnnnnnnnnnnnnnnnnnnnnnnnnnnnnnnnnnnnnnnnnnnnnnnnnnnnnnnnnnnnnnnnnnnnnnnnnnnnnnnnnnnnnnnnnnnnnnnnnnnnnnnnnnnnnnnnnnnnnnnnnnnnnnnnnnnnnnnnnnnnnnnnnnnnnnnnnnnnnnnnnnnnnnnnnnnnnnnnnnnnnnnnnnnnnnnnnnnnnnnnnnnnnnnnnnnnnnnnnnnnnnnnnnnnnnnnnnnnnnnnnnnnnnnnnnnnnnnnnnnnnnnnnnnnnnnnnnnnnnnnnnnnnnnnnnnnnnnnnnnnnnnnnnnnnnnnnnnnnnnnnnnnnnnnnnnnnnnnnnnnnnnnnnnnnnnnnnnnnnnnnnnnnnnnnnnnnnnnnnnnnnnnnnnnnnnnnnnnnnnnnnnnnnnnnnnnnnnnnnnnnnnnnnnnnnnnnnnnnnnnnnnnnnnnnnnnnnnnnnnnnnnnnnnnnnnnnnnnnnnnnnnnnnnnnnnnnnnnnnnnnnnnnnnnnnnnnnnnnnnnnnnnnnnnnnnnnnnnnnnnnnnnnnnnnnnnnnnnnnnnnnnnnnnnnnnnnnnnnnnnnnnnnnnnnnnnnnnnnnnnnnnnnnnnnnnnnnnnnnnnnnnnnnnnnnnnnnnnnnnnnnnnnnnnnnnnnnnnnnnnnnnnnnnnnnnnnnnnnnnnnnnnnnnnnnnnnnnnnnnnnnnnnnnnnnnnnnnnnnnnnnnnnnnnnnnnnnnnnnnnnnnnnnnnnnnnnnnnnnnnnnnnnnnnnnnnnnnnnnnnnnnnnnnnnnnnnnnnnnnnnnnnnnnnnnnnnnnnnnnnnnnnnnnnnnnnnnnnnnnnnnnnnnnnnnnnnnnnnnnnnnnnnnnnnnnnnnnnnnnnnnnnnnnnnnnnnnnnnnnnnnnnnnnnnnnnnnnnnnnnnnnnnnnnnnnnnnnnnnnnnnnnnnnnnnnnnnnnnnnnnnnnnnnnnnnnnnnnnnnnnnnnnnnnnnnnnnnnnnnnnnnnnnnnnnnnnnnnnnnnnnnnnnnnnnnnnnnnnnnnnnnnnnnnnnnnnnnnnnnnnnnnnnnnnnnnnnnnnnnnnnnnnnnnnnnnnnnnnnnnnnnnnnnnnnnnnnnnnnnnnnnnnnnnnnnnnnnnnnnnnnnnnnnnnnnnnnnnnnnnnnnnnnnnnnnnnnnnnnnnnnnnnnnnnnnnnnnnnnnnnnnnnnnnnnnnnnnnnnnnnnnnnnnnnnnnnnnnnnnnnnnnnnnnnnnnnnnnnnnnnnnnnnnnnnnnnnnnnnnnnnnnnnnnnnnnnnnnnnnnnnnnnnnnnnnnnnnnnnnnnnnnnnnnnnnnnnnnnnnnnnnnnnnnnnnnnnnnnnnnnnnnnnnnnnnnnnnnnnnnnnnnnnnnnnnnnnnnnnnnnnnnnnnnnnnnnnnnnnnnnnnnnnnnnnnnnnnnnnnnnnnnnnnnnnnnnnnnnnnnnnnnnnnnnnnnnnnnnnnnnnnnnnnnnnnnnnnnnnnnnnnnnnnnnnnnnnnnnnnnnnnnnnnnnnnnnnnnnnnnnnnnnnnnnnnnnnnnnnnnnnnnnnnnnnnnnnnnnnnnnnnnnnnnnnnnnnnnnnnnnnnnnnnnnnnnnnnnnnnnnnnnnnnnnnnnnnnnnnnnnnnnnnnnnnnnnnnnnnnnnnnnnnnnnnnnnnnnnnnnnnnnnnnnnnnnnnnnnnnnnnnnnnnnnnnnnnnnnnnnnnnnnnnnnnnnnnnnnnnnnnnnnnnnnnnnnnnnnnnnnnnnnnnnnnnnnnnnnnnnnnnnnnnnnnnnnnnnnnnnnnnnnnnnnnnnnnnnnnnnnnnnnnnnnnnnnnnnnnnnnnnnnnnnnnnnnnnnnnnnnnnnnnnnnnnnnnnnnnnnnnnnnnnnnnnnnnnnnnnnnnnnnnnnnnnnnnnnnnnnnnnnnnnnnnnnnnnnnnnnnnnnnnnnnnnnnnnnnnnnnnnnnnnnnnnnnnnnnnnnnnnnnnnnnnnnnnnnnnnnnnnnnnnnnnnnnnnnnnnnnnnnnnnnnnnnnnnnnnnnnnnnnnnnnnnnnnnnnnnnnnnnnnnnnnnnnnnnnnnnnnnnnnnnnnnnnnnnnnnnnnnnnnnnnnnnnnnnnnnnnnnnnnnnnnnnnnnnnnnnnnnnnnnnnnnnnnnnnnnnnnnnnnnnnnnnnnnnnnnnnnnnnnnnnnnnnnnnnnnnnnnnnnnnnnnnnnnnnnnnnnnnnnnnnnnnnnnnnnnnnnnnnnnnnnnnnnnnnnnnnnnnnnnnnnnnnnnnnnnnnnnnnnnnnnnnnnnnnnnnnnnnnnnnnnnnnnnnnnnnnnnnnnnnnnnnnnnnnnnnnnnnnnnnnnnnnnnnnnnnnnnnnnnnnnnnnnnnnnnnnnnnnnnnnnnnnnnnnnnnnnnnnnnnnnnnnnnnnnnnnnnnnnnnnnnnnnnnnnnnnnnnnnnnnnnnnnnnnnnnnnnnnnnnnnnnnnnnnnnnnnnnnnnnnnnnnnnnnnnnnnnnnnnnnnnnnnnnnnnnnnnnnnnnnnnnnnnnnnnnnnnnnnnnnnnnnnnnnnnnnnnnnnnnnnnnnnnnnnnnnnnnnnnnnnnnnnnnnnnnnnnnnnnnnnnnnnnnnnnnnnnnnnnnnnnnnnnnnnnnnnnnnnnnnnnnnnnnnnnnnnnnnnnnnnnnnnnnnnnnnnnnnnnnnnnnnnnnnnnnnnnnnnnnnnnnnnnnnnnnnnnnnnnnnnnnnnnnnnnnnnnnnnnnnnnnnnnnnnnnnnnnnnnnnnnnnnnnnnnnnnnnnnnnnnnnnnnnnnnnnnnnnnnnnnnnnnnnnnnnnnnnnnnnnnnnnnnnnnnnnnnnnnnnnnnnnnnnnnnnnnnnnnnnnnnnnnnnnnnnnnnnnnnnnnnnnnnnnnnnnnnnnnnnnnnnnnnnnnnnnnnnnnnnnnnnnnnnnnnnnnnnnnnnnnnnnnnnnnnnnnnnnnnnnnnnnnnnnnnnnnnnnnnnnnnnnnnnnnnnnnnnnnnnnnnnnnnnnnnnnnnnnnnnnnnnnnnnnnnnnnnnnnnnnnnnnnnnnnnnnnnnnnnnnnnnnnnnnnnnnnnnnnnnnnnnnnnnnnnnnnnnnnnnnnnnnnnnnnnnnnnnnnnnnnnnnnnnnnnnnnnnnnnnnnnnnnnnnnnnnnnnnnnnnnnnnnnnnnnnnnnnnnnnnnnnnnnnnnnnnnnnnnnnnnnnnnnnnnnnnnnnnnnnnnnnnnnnnnnnnnnnnnnnnnnnnnnnnnnnnnnnnnnnnnnnnnnnnnnnnnnnnnnnnnnnnnnnnnnnnnnnnnnnnnnnnnnnnnnnnnnnnnnnnnnnnnnnnnnnnnnnnnnnnnnnnnnnnnnnnnnnnnnnnnnnnnnnnnnnnnnnnnnnnnnnnnnnnnnnnnnnnnnnnnnnnnnnnnnnnnnnnnnnnnnnnnnnnnnnnnnnnnnnnnnnnnnnnnnnnnnnnnnnnnnnnnnnnnnnnnnnnnnnnnnnnnnnnnnnnnnnnnnnnnnnnnnnnnnnnnnnnnnnnnnnnnnnnnnnnnnnnnnnnnnnnnnnnnnnnnnnnnnnnnnnnnnnnnnnnnnnnnnnnnnnnnnnnnnnnnnnnnnnnnnnnnnnnnnnnnnnnnnnnnnnnnnnnnnnnnnnnnnnnnnnnnnnnnnnnnnnnnnnnnnnnnnnnnnnnnnnnnnnnnnnnnnnnnnnnnnnnnnnnnnnnnnnnnnnnnnnnnnnnnnnnnnnnnnnnnnnnnnnnnnnnnnnnnnnnnnnnnnnnnnnnnnnnnnnnnnnnnnnnnnnnnnnnnnnnnnnnnnnnnnnnnnnnnnnnnnnnnnnnnnnnnnnnnnnnnnnnnnnnnnnnnnnnnnnnnnnnnnnnnnnnnnnnnnnnnnnnnnnnnnnnnnnnnnnnnnnnnnnnnnnnnnnnnnnnnnnnnnnnnnnnnnnnnnnnnnnnnnnnnnnnnnnnnnnnnnnnnnnnnnnnnnnnnnnnnnnnnnnnnnnnnnnnnnnnnnnnnnnnnnnnnnnnnnnnnnnnnnnnnnnnnnnnnnnnnnnnnnnnnnnnnnnnnnnnnnnnnnnnnnnnnnnnnnnnnnnnnnnnnnnnnnnnnnnnnnnnnnnnnnnnnnnnnnnnnnnnnnnnnnnnnnnnnnnnnnnnnnnnnnnnnnnnnnnnnnnnnnnnnnnnnnnnnnnnnnnnnnnnnnnnnnnnnnnnnnnnnnnnnnnnnnnnnnnnnnnnnnnnnnnnnnnnnnnnnnnnnnnnnnnnnnnnnnnnnnnnnnnnnnnnnnnnnnnnnnnnnnnnnnnnnnnnnnnnnnnnnnnnnnnnnnnnnnnnnnnnnnnnnnnnnnnnnnnnnnnnnnnnnnnnnnnnnnnnnnnnnnnnnnnnnnnnnnnnnnnnnnnnnnnnnnnnnnnnnnnnnnnnnnnnnnnnnnnnnnnnnnnnnnnnnnnnnnnnnnnnnnnnnnnnnnnnnnnnnnnnnnnnnnnnnnnnnnnnnnnnnnnnnnnnnnnnnnnnnnnnnnnnnnnnnnnnnnnnnnnnnnnnnnnnnnnnnnnnnnnnnnnnnnnnnnnnnnnnnnnnnnnnnnnnnnnnnnnnnnnnnnnnnnnnnnnnnnnnnnnnnnnnnnnnnnnnnnnnnnnnnnnnnnnnnnnnnnnnnnnnnnnnnnnnnnnnnnnnnnnnnnnnnnnnnnnnnnnnnnnnnnnnnnnnnnnnnnnnnnnnnnnnnnnnnnnnnnnnnnnnnnnnnnnnnnnnnnnnnnnnnnnnnnnnnnnnnnnnnnnnnnnnnnnnnnnnnnnnnnnnnnnnnnnnnnnnnnnnnnnnnnnnnnnnnnnnnnnnnnnnnnnnnnnnnnnnnnnnnnnnnnnnnnnnnnnnnnnnnnnnnnnnnnnnnnnnnnnnnnnnnnnnnnnnnnnnnnnnnnnnnnnnnnnnnnnnnnnnnnnnnnnnnnnnnnnnnnnnnnnnnnnnnnnnnnnnnnnnnnnnnnnnnnnnnnnnnnnnnnnnnnnnnnnnnnnnnnnnnnnnnnnnnnnnnnnnnnnnnnnnnnnnnnnnnnnnnnnnnnnnnnnnnnnnnnnnnnnnnnnnnnnnnnnnnnnnnnnnnnnnnnnnnnnnnnnnnnnnnnnnnnnnnnnnnnnnnnnnnnnnnnnnnnnnnnnnnnnnnnnnnnnnnnnnnnnnnnnnnnnnnnnnnnnnnnnnnnnnnnnnnnnnnnnnnnnnnnnnnnnnnnnnnnnnnnnnnnnnnnnnnnnnnnnnnnnnnnnnnnnnnnnnnnnnnnnnnnnnnnnnnnnnnnnnnnnnnnnnnnnnnnnnnnnnnnnnnnnnnnnnnnnnnnnnnnnnnnnnnnnnnnnnnnnnnnnnnnnnnnnnnnnnnnnnnnnnnnnnnnnnnnnnnnnnnnnnnnnnnnnnnnnnnnnnnnnnnnnnnnnnnnnnnnnnnnnnnnnnnnnnnnnnnnnnnnnnnnnnnnnnnnnnnnnnnnnnnnnnnnnnnnnnnnnnnnnnnnnnnnnnnnnnnnnnnnnnnnnnnnnnnnnnnnnnnnnnnnnnnnnnnnnnnnnnnnnnnnnnnnnnnnnnnnnnnnnnnnnnnnnnnnnnnnnnnnnnnnnnnnnnnnnnnnnnnnnnnnnnnnnnnnnnnnnnnnnnnnnnnnnnnnnnnnnnnnnnnnnnnnnnnnnnnnnnnnnnnnnnnnnnnnnnnnnnnnnnnnnnnnnnnnnnnnnnnnnnnnnnnnnnnnnnnnnnnnnnnnnnnnnnnnnnnnnnnnnnnnnnnnnnnnnnnnnnnnnnnnnnnnnnnnnnnnnnnnnnnnnnnnnnnnnnnnnnnnnnnnnnnnnnnnnnnnnnnnnnnnnnnnnnnnnnnnnnnnnnnnnnnnnnnnnnnnnnnnnnnnnnnnnnnnnnnnnnnnnnnnnnnnnnnnnnnnnnnnnnnnnnnnnnnnnnnnnnnnnnnnnnnnnnnnnnnnnnnnnnnnnnnnnnnnnnnnnnnnnnnnnnnnnnnnnnnnnnnnnnnnnnnnnnnnnnnnnnnnnnnnnnnnnnnnnnnnnnnnnnnnnnnnnnnnnnnnnnnnnnnnnnnnnnnnnnnnnnnnnnnnnnnnnnnnnnnnnnnnnnnnnnnnnnnnnnnnnnnnnnnnnnnnnnnnnnnnnnnnnnnnnnnnnnnnnnnnnnnnnnnnnnnnnnnnnnnnnnnnnnnnnnnnnnnnnnnnnnnnnnnnnnnnnnnnnnnnnnnnnnnnnnnnnnnnnnnnnnnnnnnnnnnnnnnnnnnnnnnnnnnnnnnnnnnnnnnnnnnnnnnnnnnnnnnnnnnnnnnnnnnnnnnnnnnnnnnnnnnnnnnnnnnnnnnnnnnnnnnnnnnnnnnnnnnnnnnnnnnnnnnnnnnnnnnnnnnnnnnnnnnnnnnnnnnnnnnnnnnnnnnnnnnnnnnnnnnnnnnnnnnnnnnnnnnnnnnnnnnnnnnnnnnnnnnnnnnnnnnnnnnnnnnnnnnnnnnnnnnnnnnnnnnnnnnnnnnnnnnnnnnnnnnnnnnnnnnnnnnnnnnnnnnnnnnnnnnnnnnnnnnnnnnnnnnnnnnnnnnnnnnnnnnnnnnnnnnnnnnnnnnnnnnnnnnnnnnnnnnnnnnnnnnnnnnnnnnnnnnnnnnnnnnnnnnnnnnnnnnnnnnnnnnnnnnnnnnnnnnnnnnnnnnnnnnnnnnnnnnnnnnnnnnnnnnnnnnnnnnnnnnnnnnnnnnnnnnnnnnnnnnnnnnnnnnnnnnnnnnnnnnnnnnnnnnnnnnnnnnnnnnnnnnnnnnnnnnnnnnnnnnnnnnnnnnnnnnnnnnnnnnnnnnnnnnnnnnnnnnnnnnnnnnnnnnnnnnnnnnnnnnnnnnnnnnnnnnnnnnnnnnnnnnnnnnnnnnnnnnnnnnnnnnnnnnnnnnnnnnnnnnnnnnnnnnnnnnnnnnnnnnnnnnnnnnnnnnnnnnnnnnnnnnnnnnnnnnnnnnnnnnnnnnnnnnnnnnnnnnnnnnnnnnnnnnnnnnnnnnnnnnnnnnnnnnnnnnnnnnnnnnnnnnnnnnnnnnnnnnnnnnnnnnnnnnnnnnnnnnnnnnnnnnnnnnnnnnnnnnnnnnnnnnnnnnnnnnnnnnnnnnnnnnnnnnnnnnnnnnnnnnnnnnnnnnnnnnnnnnnnnnnnnnnnnnnnnnnnnnnnnnnnnnnnnnnnnnnnnnnnnnnnnnnnnnnnnnnnnnnnnnnnnnnnnnnnnnnnnnnnnnnnnnnnnnnnnnnnnnnnnnnnnnnnnnnnnnnnnnnnnnnnnnnnnnnnnnnnnnnnnnnnnnnnnnnnnnnnnnnnnnnnnnnnnnnnnnnnnnnnnnnnnnnnnnnnnnnnnnnnnnnnnnnnnnnnnnnnnnnnnnnnnnnnnnnnnnnnnnnnnnnnnnnnnnnnnnnnnnnnnnnnnnnnnnnnnnnnnnnnnnnnnnnnnnnnnnnnnnnnnnnnnnnnnnnnnnnnnnnnnnnnnnnnnnnnnnnnnnnnnnnnnnnnnnnnnnnnnnnnnnnnnnnnnnnnnnnnnnnnnnnnnnnnnnnnnnnnnnnnnnnnnnnnnnnnnnnnnnnnnnnnnnnnnnnnnnnnnnnnnnnnnnnnnnnnnnnnnnnnnnnnnnnnnnnnnnnnnnnnnnnnnnnnnnnnnnnnnnnnnnnnnnnnnnnnnnnnnnnnnnnnnnnnnnnnnnnnnnnnnnnnnnnnnnnnnnnnnnnnnnnnnnnnnnnnnnnnnnnnnnnnnnnnnnnnnnnnnnnnnnnnnnnnnnnnnnnnnnnnnnnnnnnnnnnnnnnnnnnnnnnnnnnnnnnnnnnnnnnnnnnnnnnnnnnnnnnnnnnnnnnnnnnnnnnnnnnnnnnnnnnnnnnnnnnnnnnnnnnnnnnnnnnnnnnnnnnnnnnnnnnnnnnnnnnnnnnnnnnnnnnnnnnnnnnnnnnnnnnnnnnnnnnnnnnnnnnnnnnnnnnnnnnnnnnnnnnnnnnnnnnnnnnnnnnnnnnnnnnnnnnnnnnnnnnnnnnnnnnnnnnnnnnnnnnnnnnnnnnnnnnnnnnnnnnnnnnnnnnnnnnnnnnnnnnnnnnnnnnnnnnnnnnnnnnnnnnnnnnnnnnnnnnnnnnnnnnnnnnnnnnnnnnnnnnnnnnnnnnnnnnnnnnnnnnnnnnnnnnnnnnnnnnnnnnnnnnnnnnnnnnnnnnnnnnnnnnnnnnnnnnnnnnnnnnnnnnnnnnnnnnnnnnnnnnnnnnnnnnnnnnnnnnnnnnnnnnnnnnnnnnnnnnnnnnnnnnnnnnnnnnnnnnnnnnnnnnnnnnnnnnnnnnnnnnnnnnnnnnnnnnnnnnnnnnnnnnnnnnnnnnnnnnnnnnnnnnnnnnnnnnnnnnnnnnnnnnnnnnnnnnnnnnnnnnnnnnnnnnnnnnnnnnnnnnnnnnnnnnnnnnnnnnnnnnnnnnnnnnnnnnnnnnnnnnnnnnnnnnnnnnnnnnnnnnnnnnnnnnnnnnnnnnnnnnnnnnnnnnnnnnnnnnnnnnnnnnnnnnnnnnnnnnnnnnnnnnnnnnnnnnnnnnnnnnnnnnnnnnnnnnnnnnnnnnnnnnnnnnnnnnnnnnnnnnnnnnnnnnnnnnnnnnnnnnnnnnnnnnnnnnnnnnnnnnnnnnnnnnnnnnnnnnnnnnnnnnnnnnnnnnnnnnnnnnnnnnnnnnnnnnnnnnnnnnnnnnnnnnnnnnnnnnnnnnnnnnnnnnnnnnnnnnnnnnnnnnnnnnnnnnnnnnnnnnnnnnnnnnnnnnnnnnnnnnnnnnnnnnnnnnnnnnnnnnnnnnnnnnnnnnnnnnnnnnnnnnnnnnnnnnnnnnnnnnnnnnnnnnnnnnnnnnnnnnnnnnnnnnnnnnnnnnnnnnnnnnnnnnnnnnnnnnnnnnnnnnnnnnnnnnnnnnnnnnnnnnnnnnnnnnnnnnnnnnnnnnnnnnnnnnnnnnnnnnnnnnnnnnnnnnnnnnnnnnnnnnnnnnnnnnnnnnnnnnnnnnnnnnnnnnnnnnnnnnnnnnnnnnnnnnnnnnnnnnnnnnnnnnnnnnnnnnnnnnnnnnnnnnnnnnnnnnnnnnnnnnnnnnnnnnnnnnnnnnnnnnnnnnnnnnnnnnnnnnnnnnnnnnnnnnnnnnnnnnnnnnnnnnnnnnnnnnnnnnnnnnnnnnnnnnnnnnnnnnnnnnnnnnnnnnnnnnnnnnnnnnnnnnnnnnnnnnnnnnnnnnnnnnnnnnnnnnnnnnnnnnnnnnnnnnnnnnnnnnnnnnnnnnnnnnnnnnnnnnnnnnnnnnnnnnnnnnnnnnnnnnnnnnnnnnnnnnnnnnnnnnnnnnnnnnnnnnnnnnnnnnnnnnnnnnnnnnnnnnnnnnnnnnnnnnnnnnnnnnnnnnnnnnnnnnnnnnnnnnnnnnnnnnnnnnnnnnnnnnnnnnnnnnnnnnnnnnnnnnnnnnnnnnnnnnnnnnnnnnnnnnnnnnnnnnnnnnnnnnnnnnnnnnnnnnnnnnnnnnnnnnnnnnnnnnnnnnnnnnnnnnnnnnnnnnnnnnnnnnnnnnnnnnnnnnnnnnnnnnnnnnnnnnnnnnnnnnnnnnnnnnnnnnnnnnnnnnnnnnnnnnnnnnnnnnnnnnnnnnnnnnnnnnnnnnnnnnnnnnnnnnnnnnnnnnnnnnnnnnnnnnnnnnnnnnnnnnnnnnnnnnnnnnnnnnnnnnnnnnnnnnnnnnnnnnnnnnnnnnnnnnnnnnnnnnnnnnnnnnnnnnnnnnnnnnnnnnnnnnnnnnnnnnnnnnnnnnnnnnnnnnnnnnnnnnnnnnnnnnnnnnnnnnnnnnnnnnnnnnnnnnnnnnnnnnnnnnnnnnnnnnnnnnnnnnnnnnnnnnnnnnnnnnnnnnnnnnnnnnnnnnnnnnnnnnnnnnnnnnnnnnnnnnnnnnnnnnnnnnnnnnnnnnnnnnnnnnnnnnnnnnnnnnnnnnnnnnnnnnnnnnnnnnnnnnnnnnnnnnnnnnnnnnnnnnnnnnnnnnnnnnnnnnnnnnnnnnnnnnnnnnnnnnnnnnnnnnnnnnnnnnnnnnnnnnnnnnnnnnnnnnnnnnnnnnnnnnnnnnnnnnnnnnnnnnnnnnnnnnnnnnnnnnnnnnnnnnnnnnnnnnnnnnnnnnnnnnnnnnnnnnnnnnnnnnnnnnnnnnnnnnnnnnnnnnnnnnnnnnnnnnnnnnnnnnnnnnnnnnnnnnnnnnnnnnnnnnnnnnnnnnnnnnnnnnnnnnnnnnnnnnnnnnnnnnnnnnnnnnnnnnnnnnnnnnnnnnnnnnnnnnnnnnnnnnnnnnnnnnnnnnnnnnnnnnnnnnnnnnnnnnnnnnnnnnnnnnnnnnnnnnnnnnnnnnnnnnnnnnnnnnnnnnnnnnnnnnnnnnnnnnnnnnnnnnnnnnnnnnnnnnnnnnnnnnnnnnnnnnnnnnnnnnnnnnnnnnnnnnnnnnnnnnnnnnnnnnnnnnnnnnnnnnnnnnnnnnnnnnnnnnnnnnnnnnnnnnnnnnnnnnnnnnnnnnnnnnnnnnnnnnnnnnnnnnnnnnnnnnnnnnnnnnnnnnnnnnnnnnnnnnnnnnnnnnnnnnnnnnnnnnnnnnnnnnnnnnnnnnnnnnnnnnnnnnnnnnnnnnnnnnnnnnnnnnnnnnnnnnnnnnnnnnnnnnnnnnnnnnnnnnnnnnnnnnnnnnnnnnnnnnnnnnnnnnnnnnnnnnnnnnnnnnnnnnnnnnnnnnnnnnnnnnnnnnnnnnnnnnnnnnnnnnnnnnnnnnnnnnnnnnnnnnnnnnnnnnnnnnnnnnnnnnnnnnnnnnnnnnnnnnnnnnnnnnnnnnnnnnnnnnnnnnnnnnnnnnnnnnnnnnnnnnnnnnnnnnnnnnnnnnnnnnnnnnnnnnnnnnnnnnnnnnnnnnnnnnnnnnnnnnnnnnnnnnnnnnnnnnnnnnnnnnnnnnnnnnnnnnnnnnnnnnnnnnnnnnnnnnnnnnnnnnnnnnnnnnnnnnnnnnnnnnnnnnnnnnnnnnnnnnnnnnnnnnnnnnnnnnnnnnnnnnnnnnnnnnnnnnnnnnnnnnnnnnnnnnnnnnnnnnnnnnnnnnnnnnnnnnnnnnnnnnnnnnnnnnnnnnnnnnnnnnnnnnnnnnnnnnnnnnnnnnnnnnnnnnnnnnnnnnnnnnnnnnnnnnnnnnnnnnnnnnnnnnnnnnnnnnnnnnnnnnnnnnnnnnnnnnnnnnnnnnnnnnnnnnnnnnnnnnnnnnnnnnnnnnnnnnnnnnnnnnnnnnnnnnnnnnnnnnnnnnnnnnnnnnnnnnnnnnnnnnnnnnnnnnnnnnnnnnnnnnnnnnnnnnnnnnnnnnnnnnnnnnnnnnnnnnnnnnnnnnnnnnnnnnnnnnnnnnnnnnnnnnnnnnnnnnnnnnnnnnnnnnnnnnnnnnnnnnnnnnnnnnnnnnnnnnnnnnnnnnnnnnnnnnnnnnnnnnnnnnnnnnnnnnnnnnnnnnnnnnnnnnnnnnnnnnnnnnnnnnnnnnnnnnnnnnnnnnnnnnnnnnnnnnnnnnnnnnnnnnnnnnnnnnnnnnnnnnnnnnnnnnnnnnnnnnnnnnnnnnnnnnnnnnnnnnnnnnnnnnnnnnnnnnnnnnnnnnnnnnnnnnnnnnnnnnnnnnnnnnnnnnnnnnnnnnnnnnnnnnnnnnnnnnnnnnnnnnnnnnnnnnnnnnnnnnnnnnnnnnnnnnnnnnnnnnnnnnnnnnnnnnnnnnnnnnnnnnnnnnnnnnnnnnnnnnnnnnnnnnnnnnnnnnnnnnnnnnnnnnnnnnnnnnnnnnnnnnnnnnnnnnnnnnnnnnnnnnnnnnnnnnnnnnnnnnnnnnnnnnnnnnnnnnnnnnnnnnnnnnnnnnnnnnnnnnnnnnnnnnnnnnnnnnnnnnnnnnnnnnnnnnnnnnnnnnnnnnnnnnnnnnnnnnnnnnnnnnnnnnnnnnnnnnnnnnnnnnnnnnnnnnnnnnnnnnnnnnnnnnnnnnnnnnnnnnnnnnnnnnnnnnnnnnnnnnnnnnnnnnnnnnnnnnnnnnnnnnnnnnnnnnnnnnnnnnnnnnnnnnnnnnnnnnnnnnnnnnnnnnnnnnnnnnnnnnnnnnnnnnnnnnnnnnnnnnnnnnnnnnnnnnnnnnnnnnnnnnnnnnnnnnnnnnnnnnnnnnnnnnnnnnnnnnnnnnnnnnnnnnnnnnnnnnnnnnnnnnnnnnnnnnnnnnnnnnnnnnnnnnnnnnnnnnnnnnnnnnnnnnnnnnnnnnnnnnnnnnnnnnnnnnnnnnnnnnnnnnnnnnnnnnnnnnnnnnnnnnnnnnnnnnnnnnnnnnnnnnnnnnnnnnnnnnnnnnnnnnnnnnnnnnnnnnnnnnnnnnnnnnnnnnnnnnnnnnnnnnnnnnnnnnnnnnnnnnnnnnnnnnnnnnnnnnnnnnnnnnnnnnnnnnnnnnnnnnnnnnnnnnnnnnnnnnnnnnnnnnnnnnnnnnnnnnnnnnnnnnnnnnnnnnnnnnnnnnnnnnnnnnnnnnnnnnnnnnnnnnnnnnnnnnnnnnnnnnnnnnnnnnnnnnnnnnnnnnnnnnnnnnnnnnnnnnnnnnnnnnnnnnnnnnnnnnnnnnnnnnnnnnnnnnnnnnnnnnnnnnnnnnnnnnnnnnnnnnnnnnnnnnnnnnnnnnnnnnnnnnnnnnnnnnnnnnnnnnnnnnnnnnnnnnnnnnnnnnnnnnnnnnnnnnnnnnnnnnnnnnnnnnnnnnnnnnnnnnnnnnnnnnnnnnnnnnnnnnnnnnnnnnnnnnnnnnnnnnnnnnnnnnnnnnnnnnnnnnnnnnnnnnnnnnnnnnnnnnnnnnnnnnnnnnnnnnnnnnnnnnnnnnnnnnnnnnnnnnnnnnnnnnnnnnnnnnnnnnnnnnnnnnnnnnnnnnnnnnnnnnnnnnnnnnnnnnnnnnnnnnnnnnnnnnnnnnnnnnnnnnnnnnnnnnnnnnnnnnnnnnnnnnnnnnnnnnnnnnnnnnnnnnnnnnnnnnnnnnnnnnnnnnnnnnnnnnnnnnnnnnnnnnnnnnnnnnnnnnnnnnnnnnnnnnnnnnnnnnnnnnnnnnnnnnnnnnnnnnnnnnnnnnnnnnnnnnnnnnnnnnnnnnnnnnnnnnnnnnnnnnnnnnnnnnnnnnnnnnnnnnnnnnnnnnnnnnnnnnnnnnnnnnnnnnnnnnnnnnnnnnnnnnnnnnnnnnnnnnnnnnnnnnnnnnnnnnnnnnnnnnnnnnnnnnnnnnnnnnnnnnnnnnnnnnnnnnnnnnnnnnnnnnnnnnnnnnnnnnnnnnnnnnnnnnnnnnnnnnnnnnnnnnnnnnnnnnnnnnnnnnnnnnnnnnnnnnnnnnnnnnnnnnnnnnnnnnnnnnnnnnnnnnnnnnnnnnnnnnnnnnnnnnnnnnnnnnnnnnnnnnnnnnnnnnnnnnnnnnnnnnnnnnnnnnnnnnnnnnnnnnnnnnnnnnnnnnnnnnnnnnnnnnnnnnnnnnnnnnnnnnnnnnnnnnnnnnnnnnnnnnnnnnnnnnnnnnnnnnnnnnnnnnnnnnnnnnnnnnnnnnnnnnnnnnnnnnnnnnnnnnnnnnnnnnnnnnnnnnnnnnnnnnnnnnnnnnnnnnnnnnnnnnnnnnnnnnnnnnnnnnnnnnnnnnnnnnnnnnnnnnnnnnnnnnnnnnnnnnnnnnnnnnnnnnnnnnnnnnnnnnnnnnnnnnnnnnnnnnnnnnnnnnnnnnnnnnnnnnnnnnnnnnnnnnnnnnnnnnnnnnnnnnnnnnnnnnnnnnnnnnnnnnnnnnnnnnnnnnnnnnnnnnnnnnnnnnnnnnnnnnnnnnnnnnnnnnnnnnnnnnnnnnnnnnnnnnnnnnnnnnnnnnnnnnnnnnnnnnnnnnnnnnnnnnnnnnnnnnnnnnnnnnnnnnnnnnnnnnnnnnnnnnnnnnnnnnnnnnnnnnnnnnnnnnnnnnnnnnnnnnnnnnnnnnnnnnnnnnnnnnnnnnnnnnnnnnnnnnnnnnnnnnnnnnnnnnnnnnnnnnnnnnnnnnnnnnnnnnnnnnnnnnnnnnnnnnnnnnnnnnnnnnnnnnnnnnnnnnnnnnnnnnnnnnnnnnnnnnnnnnnnnnnnnnnnnnnnnnnnnnnnnnnnnnnnnnnnnnnnnnnnnnnnnnnnnnnnnnnnnnnnnnnnnnnnnnnnnnnnnnnnnnnnnnnnnnnnnnnnnnnnnnnnnnnnnnnnnnnnnnnnnnnnnnnnnnnnnnnnnnnnnnnnnnnnnnnnnnnnnnnnnnnnnnnnnnnnnnnnnnnnnnnnnnnnnnnnnnnnnnnnnnnnnnnnnnnnnnnnnnnnnnnnnnnnnnnnnnnnnnnnnnnnnnnnnnnnnnnnnnnnnnnnnnnnnnnnnnnnnnnnnnnnnnnnnnnnnnnnnnnnnnnnnnnnnnnnnnnnnnnnnnnnnnnnnnnnnnnnnnnnnnnnnnnnnnnnnnnnnnnnnnnnnnnnnnnnnnnnnnnnnnnnnnnnnnnnnnnnnnnnnnnnnnnnnnnnnnnnnnnnnnnnnnnnnnnnnnnnnnnnnnnnnnnnnnnnnnnnnnnnnnnnnnnnnnnnnnnnnnnnnnnnnnnnnnnnnnnnnnnnnnnnnnnnnnnnnnnnnnnnnnnnnnnnnnnnnnnnnnnnnnnnnnnnnnnnnnnnnnnnnnnnnnnnnnnnnnnnnnnnnnnnnnnnnnnnnnnnnnnnnnnnnnnnnnnnnnnnnnnnnnnnnnnnnnnnnnnnnnnnnnnnnnnnnnnnnnnnnnnnnnnnnnnnnnnnnnnnnnnnnnnnnnnnnnnnnnnnnnnnnnnnnnnnnnnnnnnnnnnnnnnnnnnnnnnnnnnnnnnnnnnnnnnnnnnnnnnnnnnnnnnnnnnnnnnnnnnnnnnnnnnnnnnnnnnnnnnnnnnnnnnnnnnnnnnnnnnnnnnnnnnnnnnnnnnnnnnnnnnnnnnnnnnnnnnnnnnnnnnnnnnnnnnnnnnnnnnnnnnnnnnnnnnnnnnnnnnnnnnnnnnnnnnnnnnnnnnnnnnnnnnnnnnnnnnnnnnnnnnnnnnnnnnnnnnnnnnnnnnnnnnnnnnnnnnnnnnnnnnnnnnnnnnnnnnnnnnnnnnnnnnnnnnnnnnnnnnnnnnnnnnnnnnnnnnnnnnnnnnnnnnnnnnnnnnnnnnnnnnnnnnnnnnnnnnnnnnnnnnnnnnnnnnnnnnnnnnnnnnnnnnnnnnnnnnnnnnnnnnnnnnnnnnnnnnnnnnnnnnnnnnnnnnnnnnnnnnnnnnnnnnnnnnnnnnnnnnnnnnnnnnnnnnnnnnnnnnnnnnnnnnnnnnnnnnnnnnnnnnnnnnnnnnnnnnnnnnnnnnnnnnnnnnnnnnnnnnnnnnnnnnnnnnnnnnnnnnnnnnnnnnnnnnnnnnnnnnnnnnnnnnnnnnnnnnnnnnnnnnnnnnnnnnnnnnnnnnnnnnnnnnnnnnnnnnnnnnnnnnnnnnnnnnnnnnnnnnnnnnnnnnnnnnnnnnnnnnnnnnnnnnnnnnnnnnnnnnnnnnnnnnnnnnnnnnnnnnnnnnnnnnnnnnnnnnnnnnnnnnnnnnnnnnnnnnnnnnnnnnnnnnnnnnnnnnnnnnnnnnnnnnnnnnnnnnnnnnnnnnnnnnnnnnnnnnnnnnnnnnnnnnnnnnnnnnnnnnnnnnnnnnnnnnnnnnnnnnnnnnnnnnnnnnnnnnnnnnnnnnnnnnnnnnnnnnnnnnnnnnnnnnnnnnnnnnnnnnnnnnnnnnnnnnnnnnnnnnnnnnnnnnnnnnnnnnnnnnnnnnnnnnnnnnnnnnnnnnnnnnnnnnnnnnnnnnnnnnnnnnnnnnnnnnnnnnnnnnnnnnnnnnnnnnnnnnnnnnnnnnnnnnnnnnnnnnnnnnnnnnnnnnnnnnnnnnnnnnnnnnnnnnnnnnnnnnnnnnnnnnnnnnnnnnnnnnnnnnnnnnnnnnnnnnnnnnnnnnnnnnnnnnnnnnnnnnnnnnnnnnnnnnnnnnnnnnnnnnnnnnnnnnnnnnnnnnnnnnnnnnnnnnnnnnnnnnnnnnnnnnnnnnnnnnnnnnnnnnnnnnnnnnnnnnnnnnnnnnnnnnnnnnnnnnnnnnnnnnnnnnnnnnnnnnnnnnnnnnnnnnnnnnnnnnnnnnnnnnnnnnnnnnnnnnnnnnnnnnnnnnnnnnnnnnnnnnnnnnnnnnnnnnnnnnnnnnnnnnnnnnnnnnnnnnnnnnnnnnnnnnnnnnnnnnnnnnnnnnnnnnnnnnnnnnnnnnnnnnnnnnnnnnnnnnnnnnnnnnnnnnnnnnnnnnnnnnnnnnnnnnnnnnnnnnnnnnnnnnnnnnnnnnnnnnnnnnnnnnnnnnnnnnnnnnnnnnnnnnnnnnnnnnnnnnnnnnnnnnnnnnnnnnnnnnnnnnnnnnnnnnnnnnnnnnnnnnnnnnnnnnnnnnnnnnnnnnnnnnnnnnnnnnnnnnnnnnnnnnnnnnnnnnnnnnnnnnnnnnnnnnnnnnnnnnnnnnnnnnnnnnnnnnnnnnnnnnnnnnnnnnnnnnnnnnnnnnnnnnnnnnnnnnnnnnnnnnnnnnnnnnnnnnnnnnnnnnnnnnnnnnnnnnnnnnnnnnnnnnnnnnnnnnnnnnnnnnnnnnnnnnnnnnnnnnnnnnnnnnnnnnnnnnnnnnnnnnnnnnnnnnnnnnnnnnnnnnnnnnnnnnnnnnnnnnnnnnnnnnnnnnnnnnnnnnnnnnnnnnnnnnnnnnnnnnnnnnnnnnnnnnnnnnnnnnnnnnnnnnnnnnnnnnnnnnnnnnnnnnnnnnnnnnnnnnnnnnnnnnnnnnnnnnnnnnnnnnnnnnnnnnnnnnnnnnnnnnnnnnnnnnnnnnnnnnnnnnnnnnnnnnnnnnnnnnnnnnnnnnnnnnnnnnnnnnnnnnnnnnnnnnnnnnnnnnnnnnnnnnnnnnnnnnnnnnnnnnnnnnnnnnnnnnnnnnnnnnnnnnnnnnnnnnnnnnnnnnnnnnnnnnnnnnnnnnnnnnnnnnnnnnnnnnnnnnnnnnnnnnnnnnnnnnnnnnnnnnnnnnnnnnnnnnnnnnnnnnnnnnnnnnnnnnnnnnnnnnnnnnnnnnnnnnnnnnnnnnnnnnnnnnnnnnnnnnnnnnnnnnnnnnnnnnnnnnnnnnnnnnnnnnnnnnnnnnnnnnnnnnnnnnnnnnnnnnnnnnnnnnnnnnnnnnnnnnnnnnnnnnnnnnnnnnnnnnnnnnnnnnnnnnnnnnnnnnnnnnnnnnnnnnnnnnnnnnnnnnnnnnnnnnnnnnnnnnnnnnnnnnnnnnnnnnnnnnnnnnnnnnnnnnnnnnnnnnnnnnnnnnnnnnnnnnnnnnnnnnnnnnnnnnnnnnnnnnnnnnnnnnnnnnnnnnnnnnnnnnnnnnnnnnnnnnnnnnnnnnnnnnnnnnnnnnnnnnnnnnnnnnnnnnnnnnnnnnnnnnnnnnnnnnnnnnnnnnnnnnnnnnnnnnnnnnnnnnnnnnnnnnnnnnnnnnnnnnnnnnnnnnnnnnnnnnnnnnnnnnnnnnnnnnnnnnnnnnnnnnnnnnnnnnnnnnnnnnnnnnnnnnnnnnnnnnnnnnnnnnnnnnnnnnnnnnnnnnnnnnnnnnnnnnnnnnnnnnnnnnnnnnnnnnnnnnnnnnnnnnnnnnnnnnnnnnnnnnnnnnnnnnnnnnnnnnnnnnnnnnnnnnnnnnnnnnnnnnnnnnnnnnnnnnnnnnnnnnnnnnnnnnnnnnnnnnnnnnnnnnnnnnnnnnnnnnnnnnnnnnnnnnnnnnnnnnnnnnnnnnnnnnnnnnnnnnnnnnnnnnnnnnnnnnnnnnnnnnnnnnnnnnnnnnnnnnnnnnnnnnnnnnnnnnnnnnnnnnnnnnnnnnnnnnnnnnnnnnnnnnnnnnnnnnnnnnnnnnnnnnnnnnnnnnnnnnnnnnnnnnnnnnnnnnnnnnnnnnnnnnnnnnnnnnnnnnnnnnnnnnnnnnnnnnnnnnnnnnnnnnnnnnnnnnnnnnnnnnnnnnnnnnnnnnnnnnnnnnnnnnnnnnnnnnnnnnnnnnnnnnnnnnnnnnnnnnnnnnnnnnnnnnnnnnnnnnnnnnnnnnnnnnnnnnnnnnnnnnnnnnnnnnnnnnnnnnnnnnnnnnnnnnnnnnnnnnnnnnnnnnnnnnnnnnnnnnnnnnnnnnnnnnnnnnnnnnnnnnnnnnnnnnnnnnnnnnnnnnnnnnnnnnnnnnnnnnnnnnnnnnnnnnnnnnnnnnnnnnnnnnnnnnnnnnnnnnnnnnnnnnnnnnnnnnnnnnnnnnnnnnnnnnnnnnnnnnnnnnnnnnnnnnnnnnnnnnnnnnnnnnnnnnnnnnnnnnnnnnnnnnnnnnnnnnnnnnnnnnnnnnnnnnnnnnnnnnnnnnnnnnnnnnnnnnnnnnnnnnnnnnnnnnnnnnnnnnnnnnnnnnnnnnnnnnnnnnnnnnnnnnnnnnnnnnnnnnnnnnnnnnnnnnnnnnnnnnnnnnnnnnnnnnnnnnnnnnnnnnnnnnnnnnnnnnnnnnnnnnnnnnnnnnnnnnnnnnnnnnnnnnnnnnnnnnnnnnnnnnnnnnnnnnnnnnnnnnnnnnnnnnnnnnnnnnnnnnnnnnnnnnnnnnnnnnnnnnnnnnnnnnnnnnnnnnnnnnnnnnnnnnnnnnnnnnnnnnnnnnnnnnnnnnnnnnnnnnnnnnnnnnnnnnnnnnnnnnnnnnnnnnnnnnnnnnnnnnnnnnnnnnnnnnnnnnnnnnnnnnnnnnnnnnnnnnnnnnnnnnnnnnnnnnnnnnnnnnnnnnnnnnnnnnnnnnnnnnnnnnnnnnnnnnnnnnnnnnnnnnnnnnnnnnnnnnnnnnnnnnnnnnnnnnnnnnnnnnnnnnnnnnnnnnnnnnnnnnnnnnnnnnnnnnnnnnnnnnnnnnnnnnnnnnnnnnnnnnnnnnnnnnnnnnnnnnnnnnnnnnnnnnnnnnnnnnnnnnnnnnnnnnnnnnnnnnnnnnnnnnnnnnnnnnnnnnnnnnnnnnnnnnnnnnnnnnnnnnnnnnnnnnnnnnnnnnnnnnnnnnnnnnnnnnnnnnnnnnnnnnnnnnnnnnnnnnnnnnnnnnnnnnnnnnnnnnnnnnnnnnnnnnnnnnnnnnnnnnnnnnnnnnnnnnnnnnnnnnnnnnnnnnnnnnnnnnnnnnnnnnnnnnnnnnnnnnnnnnnnnnnnnnnnnnnnnnnnnnnnnnnnnnnnnnnnnnnnnnnnnnnnnnnnnnnnnnnnnnnnnnnnnnnnnnnnnnnnnnnnnnnnnnnnnnnnnnnnnnnnnnnnnnnnnnnnnnnnnnnnnnnnnnnnnnnnnnnnnnnnnnnnnnnnnnnnnnnnnnnnnnnnnnnnnnnnnnnnnnnnnnnnnnnnnnnnnnnnnnnnnnnnnnnnnnnnnnnnnnnnnnnnnnnnnnnnnnnnnnnnnnnnnnnnnnnnnnnnnnnnnnnnnnnnnnnnnnnnnnnnnnnnnnnnnnnnnnnnnnnnnnnnnnnnnnnnnnnnnnnnnnnnnnnnnnnnnnnnnnnnnnnnnnnnnnnnnnnnnnnnnnnnnnnnnnnnnnnnnnnnnnnnnnnnnnnnnnnnnnnnnnnnnnnnnnnnnnnnnnnnnnnnnnnnnnnnnnnnnnnnnnnnnnnnnnnnnnnnnnnnnnnnnnnnnnnnnnnnnnnnnnnnnnnnnnnnnnnnnnnnnnnnnnnnnnnnnnnnnnnnnnnnnnnnnnnnnnnnnnnnnnnnnnnnnnnnnnnnnnnnnnnnnnnnnnnnnnnnnnnnnnnnnnnnnnnnnnnnnnnnnnnnnnnnnnnnnnnnnnnnnnnnnnnnnnnnnnnnnnnnnnnnnnnnnnnnnnnnnnnnnnnnnnnnnnnnnnnnnnnnnnnnnnnnnnnnnnnnnnnnnnnnnnnnnnnnnnnnnnnnnnnnnnnnnnnnnnnnnnnnnnnnnnnnnnnnnnnnnnnnnnnnnnnnnnnnnnnnnnnnnnnnnnnnnnnnnnnnnnnnnnnnnnnnnnnnnnnnnnnnnnnnnnnnnnnnnnnnnnnnnnnnnnnnnnnnnnnnnnnnnnnnnnnnnnnnnnnnnnnnnnnnnnnnnnnnnnnnnnnnnnnnnnnnnnnnnnnnnnnnnnnnnnnnnnnnnnnnnnnnnnnnnnnnnnnnnnnnnnnnnnnnnnnnnnnnnnnnnnnnnnnnnnnnnnnnnnnnnnnnnnnnnnnnnnnnnnnnnnnnnnnnnnnnnnnnnnnnnnnnnnnnnnnnnnnnnnnnnnnnnnnnnnnnnnnnnnnnnnnnnnnnnnnnnnnnnnnnnnnnnnnnnnnnnnnnnnnnnnnnnnnnnnnnnnnnnnnnnnnnnnnnnnnnnnnnnnnnnnnnnnnnnnnnnnnnnnnnnnnnnnnnnnnnnnnnnnnnnnnnnnnnnnnnnnnnnnnnnnnnnnnnnnnnnnnnnnnnnnnnnnnnnnnnnnnnnnnnnnnnnnnnnnnnnnnnnnnnnnnnnnnnnnnnnnnnnnnnnnnnnnnnnnnnnnnnnnnnnnnnnnnnnnnnnnnnnnnnnnnnnnnnnnnnnnnnnnnnnnnnnnnnnnnnnnnnnnnnnnnnnnnnnnnnnnnnnnnnnnnnnnnnnnnnnnnnnnnnnnnnnnnnnnnnnnnnnnnnnnnnnnnnnnnnnnnnnnnnnnnnnnnnnnnnnnnnnnnnnnnnnnnnnnnnnnnnnnnnnnnnnnnnnnnnnnnnnnnnnnnnnnnnnnnnnnnnnnnnnnnnnnnnnnnnnnnnnnnnnnnnnnnnnnnnnnnnnnnnnnnnnnnnnnnnnnnnnnnnnnnnnnnnnnnnnnnnnnnnnnnnnnnnnnnnnnnnnnnnnnnnnnnnnnnnnnnnnnnnnnnnnnnnnnnnnnnnnnnnnnnnnnnnnnnnnnnnnnnnnnnnnnnnnnnnnnnnnnnnnnnnnnnnnnnnnnnnnnnnnnnnnnnnnnnnnnnnnnnnnnnnnnnnnnnnnnnnnnnnnnnnnnnnnnnnnnnnnnnnnnnnnnnnnnnnnnnnnnnnnnnnnnnnnnnnnnnnnnnnnnnnnnnnnnnnnnnnnnnnnnnnnnnnnnnnnnnnnnnnnnnnnnnnnnnnnnnnnnnnnnnnnnnnnnnnnnnnnnnnnnnnnnnnnnnnnnnnnnnnnnnnnnnnnnnnnnnnnnnnnnnnnnnnnnnnnnnnnnnnnnnnnnnnnnnnnnnnnnnnnnnnnnnnnnnnnnnnnnnnnnnnnnnnnnnnnnnnnnnnnnnnnnnnnnnnnnnnnnnnnnnnnnnnnnnnnnnnnnnnnnnnnnnnnnnnnnnnnnnnnnnnnnnnnnnnnnnnnnnnnnnnnnnnnnnnnnnnnnnnnnnnnnnnnnnnnnnnnnnnnnnnnnnnnnnnnnnnnnnnnnnnnnnnnnnnnnnnnnnnnnnnnnnnnnnnnnnnnnnnnnnnnnnnnnnnnnnnnnnnnnnnnnnnnnnnnnnnnnnnnnnnnnnnnnnnnnnnnnnnnnnnnnnnnnnnnnnnnnnnnnnnnnnnnnnnnnnnnnnnnnnnnnnnnnnnnnnnnnnnnnnnnnnnnnnnnnnnnnnnnnnnnnnnnnnnnnnnnnnnnnnnnnnnnnnnnnnnnnnnnnnnnnnnnnnnnnnnnnnnnnnnnnnnnnnnnnnnnnnnnnnnnnnnnnnnnnnnnnnnnnnnnnnnnnnnnnnnnnnnnnnnnnnnnnnnnnnnnnnnnnnnnnnnnnnnnnnnnnnnnnnnnnnnnnnnnnnnnnnnnnnnnnnnnnnnnnnnnnnnnnnnnnnnnnnnnnnnnnnnnnnnnnnnnnnnnnnnnnnnnnnnnnnnnnnnnnnnnnnnnnnnnnnnnnnnnnnnnnnnnnnnnnnnnnnnnnnnnnnnnnnnnnnnnnnnnnnnnnnnnnnnnnnnnnnnnnnnnnnnnnnnnnnnnnnnnnnnnnnnnnnnnnnnnnnnnnnnnnnnnnnnnnnnnnnnnnnnnnnnnnnnnnnnnnnnnnnnnnnnnnnnnnnnnnnnnnnnnnnnnnnnnnnnnnnnnnnnnnnnnnnnnnnnnnnnnnnnnnnnnnnnnnnnnnnnnnnnnnnnnnnnnnnnnnnnnnnnnnnnnnnnnnnnnnnnnnnnnnnnnnnnnnnnnnnnnnnnnnnnnnnnnnnnnnnnnnnnnnnnnnnnnnnnnnnnnnnnnnnnnnnnnnnnnnnnnnnnnnnnnnnnnnnnnnnnnnnnnnnnnnnnnnnnnnnnnnnnnnnnnnnnnnnnnnnnnnnnnnnnnnnnnnnnnnnnnnnnnnnnnnnnnnnnnnnnnnnnnnnnnnnnnnnnnnnnnnnnnnnnnnnnnnnnnnnnnnnnnnnnnnnnnnnnnnnnnnnnnnnnnnnnnnnnnnnnnnnnnnnnnnnnnnnnnnnnnnnnnnnnnnnnnnnnnnnnnnnnnnnnnnnnnnnnnnnnnnnnnnnnnnnnnnnnnnnnnnnnnnnnnnnnnnnnnnnnnnnnnnnnnnnnnnnnnnnnnnnnnnnnnnnnnnnnnnnnnnnnnnnnnnnnnnnnnnnnnnnnnnnnnnnnnnnnnnnnnnnnnnnnnnnnnnnnnnnnnnnnnnnnnnnnnnnnnnnnnnnnnnnnnnnnnnnnnnnnnnnnnnnnnnnnnnnnnnnnnnnnnnnnnnnnnnnnnnnnnnnnnnnnnnnnnnnnnnnnnnnnnnnnnnnnnnnnnnnnnnnnnnnnnnnnnnnnnnnnnnnnnnnnnnnnnnnnnnnnnnnnnnnnnnnnnnnnnnnnnnnnnnnnnnnnnnnnnnnnnnnnnnnnnnnnnnnnnnnnnnnnnnnnnnnnnnnnnnnnnnnnnnnnnnnnnnnnnnnnnnnnnnnnnnnnnnnnnnnnnnnnnnnnnnnnnnnnnnnnnnnnnnnnnnnnnnnnnnnnnnnnnnnnnnnnnnnnnnnnnnnnnnnnnnnnnnnnnnnnnnnnnnnnnnnnnnnnnnnnnnnnnnnnnnnnnnnnnnnnnnnnnnnnnnnnnnnnnnnnnnnnnnnnnnnnnnnnnnnnnnnnnnnnnnnnnnnnnnnnnnnnnnnnnnnnnnnnnnnnnnnnnnnnnnnnnnnnnnnnnnnnnnnnnnnnnnnnnnnnnnnnnnnnnnnnnnnnnnnnnnnnnnnnnnnnnnnnnnnnnnnnnnnnnnnnnnnnnnnnnnnnnnnnnnnnnnnnnnnnnnnnnnnnnnnnnnnnnnnnnnnnnnnnnnnnnnnnnnnnnnnnnnnnnnnnnnnnnnnnnnnnnnnnnnnnnnnnnnnnnnnnnnnnnnnnnnnnnnnnnnnnnnnnnnnnnnnnnnnnnnnnnnnnnnnnnnnnnnnnnnnnnnnnnnnnnnnnnnnnnnnnnnnnnnnnnnnnnnnnnnnnnnnnnnnnnnnnnnnnnnnnnnnnnnnnnnnnnnnnnnnnnnnnnnnnnnnnnnnnnnnnnnnnnnnnnnnnnnnnnnnnnnnnnnnnnnnnnnnnnnnnnnnnnnnnnnnnnnnnnnnnnnnnnnnnnnnnnnnnnnnnnnnnnnnnnnnnnnnnnnnnnnnnnnnnnnnnnnnnnnnnnnnnnnnnnnnnnnnnnnnnnnnnnnnnnnnnnnnnnnnnnnnnnnnnnnnnnnnnnnnnnnnnnnnnnnnnnnnnnnnnnnnnnnnnnnnnnnnnnnnnnnnnnnnnnnnnnnnnnnnnnnnnnnnnnnnnnnnnnnnnnnnnnnnnnnnnnnnnnnnnnnnnnnnnnnnnnnnnnnnnnnnnnnnnnnnnnnnnnnnnnnnnnnnnnnnnnnnnnnnnnnnnnnnnnnnnnnnnnnnnnnnnnnnnnnnnnnnnnnnnnnnnnnnnnnnnnnnnnnnnnnnnnnnnnnnnnnnnnnnnnnnnnnnnnnnnnnnnnnnnnnnnnnnnnnnnnnnnnnnnnnnnnnnnnnnnnnnnnnnnnnnnnnnnnnnnnnnnnnnnnnnnnnnnnnnnnnnnnnnnnnnnnnnnnnnnnnnnnnnnnnnnnnnnnnnnnnnnnnnnnnnnnnnnnnnnnnnnnnnnnnnnnnnnnnnnnnnnnnnnnnnnnnnnnnnnnnnnnnnnnnnnnnnnnnnnnnnnnnnnnnnnnnnnnnnnnnnnnnnnnnnnnnnnnnnnnnnnnnnnnnnnnnnnnnnnnnnnnnnnnnnnnnnnnnnnnnnnnnnnnnnnnnnnnnnnnnnnnnnnnnnnnnnnnnnnnnnnnnnnnnnnnnnnnnnnnnnnnnnnnnnnnnnnnnnnnnnnnnnnnnnnnnnnnnnnnnnnnnnnnnnnnnnnnnnnnnnnnnnnnnnnnnnnnnnnnnnnnnnnnnnnnnnnnnnnnnnnnnnnnnnnnnnnnnnnnnnnnnnnnnnnnnnnnnnnnnnnnnnnnnnnnnnnnnnnnnnnnnnnnnnnnnnnnnnnnnnnnnnnnnnnnnnnnnnnnnnnnnnnnnnnnnnnnnnnnnnnnnnnnnnnnnnnnnnnnnnnnnnnnnnnnnnnnnnnnnnnnnnnnnnnnnnnnnnnnnnnnnnnnnnnnnnnnnnnnnnnnnnnnnnnnnnnnnnnnnnnnnnnnnnnnnnnnnnnnnnnnnnnnnnnnnnnnnnnnnnnnnnnnnnnnnnnnnnnnnnnnnnnnnnnnnnnnnnnnnnnnnnnnnnnnnnnnnnnnnnnnnnnnnnnnnnnnnnnnnnnnnnnnnnnnnnnnnnnnnnnnnnnnnnnnnnnnnnnnnnnnnnnnnnnnnnnnnnnnnnnnnnnnnnnnnnnnnnnnnnnnnnnnnnnnnnnnnnnnnnnnnnnnnnnnnnnnnnnnnnnnnnnnnnnnnnnnnnnnnnnnnnnnnnnnnnnnnnnnnnnnnnnnnnnnnnnnnnnnnnnnnnnnnnnnnnnnnnnnnnnnnnnnnnnnnnnnnnnnnnnnnnnnnnnnnnnnnnnnnnnnnnnnnnnnnnnnnnnnnnnnnnnnnnnnnnnnnnnnnnnnnnnnnnnnnnnnnnnnnnnnnnnnnnnnnnnnnnnnnnnnnnnnnnnnnnnnnnnnnnnnnnnnnnnnnnnnnnnnnnnnnnnnnnnnnnnnnnnnnnnnnnnnnnnnnnnnnnnnnnnnnnnnnnnnnnnnnnnnnnnnnnnnnnnnnnnnnnnnnnnnnnnnnnnnnnnnnnnnnnnnnnnnnnnnnnnnnnnnnnnnnnnnnnnnnnnnnnnnnnnnnnnnnnnnnnnnnnnnnnnnnnnnnnnnnnnnnnnnnnnnnnnnnnnnnnnnnnnnnnnnnnnnnnnnnnnnnnnnnnnnnnnnnnnnnnnnnnnnnnnnnnnnnnnnnnnnnnnnnnnnnnnnnnnnnnnnnnnnnnnnnnnnnnnnnnnnnnnnnnnnnnnnnnnnnnnnnnnnnnnnnnnnnnnnnnnnnnnnnnnnnnnnnnnnnnnnnnnnnnnnnnnnnnnnnnnnnnnnnnnnnnnnnnnnnnnnnnnnnnnnnnnnnnnnnnnnnnnnnnnnnnnnnnnnnnnnnnnnnnnnnnnnnnnnnnnnnnnnnnnnnnnnnnnnnnnnnnnnnnnnnnnnnnnnnnnnnnnnnnnnnnnnnnnnnnnnnnnnnnnnnnnnnnnnnnnnnnnnnnnnnnnnnnnnnnnnnnnnnnnnnnnnnnnnnnnnnnnnnnnnnnnnnnnnnnnnnnnnnnnnnnnnnnnnnnnnnnnnnnnnnnnnnnnnnnnnnnnnnnnnnnnnnnnnnnnnnnnnnnnnnnnnnnnnnnnnnnnnnnnnnnnnnnnnnnnnnnnnnnnnnnnnnnnnnnnnnnnnnnnnnnnnnnnnnnnnnnnnnnnnnnnnnnnnnnnnnnnnnnnnnnnnnnnnnnnnnnnnnnnnnnnnnnnnnnnnnnnnnnnnnnnnnnnnnnnnnnnnnnnnnnnnnnnnnnnnnnnnnnnnnnnnnnnnnnnnnnnnnnnnnnnnnnnnnnnnnnnnnnnnnnnnnnnnnnnnnnnnnnnnnnnnnnnnnnnnnnnnnnnnnnnnnnnnnnnnnnnnnnnnnnnnnnnnnnnnnnnnnnnnnnnnnnnnnnnnnnnnnnnnnnnnnnnnnnnnnnnnnnnnnnnnnnnnnnnnnnnnnnnnnnnnnnnnnnnnnnnnnnnnnnnnnnnnnnnnnnnnnnnnnnnnnnnnnnnnnnnnnnnnnnnnnnnnnnnnnnnnnnnnnnnnnnnnnnnnnnnnnnnnnnnnnnnnnnnnnnnnnnnnnnnnnnnnnnnnnnnnnnnnnnnnnnnnnnnnnnnnnnnnnnnnnnnnnnnnnnnnnnnnnnnnnnnnnnnnnnnnnnnnnnnnnnnnnnnnnnnnnnnnnnnnnnnnnnnnnnnnnnnnnnnnnnnnnnnnnnnnnnnnnnnnnnnnnnnnnnnnnnnnnnnnnnnnnnnnnnnnnnnnnnnnnnnnnnnnnnnnnnnnnnnnnnnnnnnnnnnnnnnnnnnnnnnnnnnnnnnnnnnnnnnnnnnnnnnnnnnnnnnnnnnnnnnnnnnnnnnnnnnnnnnnnnnnnnnnnnnnnnnnnnnnnnnnnnnnnnnnnnnnnnnnnnnnnnnnnnnnnnnnnnnnnnnnnnnnnnnnnnnnnnnnnnnnnnnnnnnnnnnnnnnnnnnnnnnnnnnnnnnnnnnnnnnnnnnnnnnnnnnnnnnnnnnnnnnnnnnnnnnnnnnnnnnnnnnnnnnnnnnnnnnnnnnnnnnnnnnnnnnnnnnnnnnnnnnnnnnnnnnnnnnnnnnnnnnnnnnnnnnnnnnnnnnnnnnnnnnnnnnnnnnnnnnnnnnnnnnnnnnnnnnnnnnnnnnnnnnnnnnnnnnnnnnnnnnnnnnnnnnnnnnnnnnnnnnnnnnnnnnnnnnnnnnnnnnnnnnnnnnnnnnnnnnnnnnnnnnnnnnnnnnnnnnnnnnnnnnnnnnnnnnnnnnnnnnnnnnnnnnnnnnnnnnnnnnnnnnnnnnnnnnnnnnnnnnnnnnnnnnnnnnnnnnnnnnnnnnnnnnnnnnnnnnnnnnnnnnnnnnnnnnnnnnnnnnnnnnnnnnnnnnnnnnnnnnnnnnnnnnnnnnnnnnnnnnnnnnnnnnnnnnnnnnnnnnnnnnnnnnnnnnnnnnnnnnnnnnnnnnnnnnnnnnnnnnnnnnnnnnnnnnnnnnnnnnnnnnnnnnnnnnnnnnnnnnnnnnnnnnnnnnnnnnnnnnnnnnnnnnnnnnnnnnnnnnnnnnnnnnnnnnnnnnnnnnnnnnnnnnnnnnnnnnnnnnnnnnnnnnnnnnnnnnnnnnnnnnnnnnnnnnnnnnnnnnnnnnnnnnnnnnnnnnnnnnnnnnnnnnnnnnnnnnnnnnnnnnnnnnnnnnnnnnnnnnnnnnnnnnnnnnnnnnnnnnnnnnnnnnnnnnnnnnnnnnnnnnnnnnnnnnnnnnnnnnnnnnnnnnnnnnnnnnnnnnnnnnnnnnnnnnnnnnnnnnnnnnnnnnnnnnnnnnnnnnnnnnnnnnnnnnnnnnnnnnnnnnnnnnnnnnnnnnnnnnnnnnnnnnnnnnnnnnnnnnnnnnnnnnnnnnnnnnnnnnnnnnnnnnnnnnnnnnnnnnnnnnnnnnnnnnnnnnnnnnnnnnnnnnnnnnnnnnnnnnnnnnnnnnnnnnnnnnnnnnnnnnnnnnnnnnnnnnnnnnnnnnnnnnnnnnnnnnnnnnnnnnnnnnnnnnnnnnnnnnnnnnnnnnnnnnnnnnnnnnnnnnnnnnnnnnnnnnnnnnnnnnnnnnnnnnnnnnnnnnnnnnnnnnnnnnnnnnnnnnnnnnnnnnnnnnnnnnnnnnnnnnnnnnnnnnnnnnnnnnnnnnnnnnnnnnnnnnnnnnnnnnnnnnnnnnnnnnnnnnnnnnnnnnnnnnnnnnnnnnnnnnnnnnnnnnnnnnnnnnnnnnnnnnnnnnnnnnnnnnnnnnnnnnnnnnnnnnnnnnnnnnnnnnnnnnnnnnnnnnnnnnnnnnnnnnnnnnnnnnnnnnnnnnnnnnnnnnnnnnnnnnnnnnnnnnnnnnnnnnnnnnnnnnnnnnnnnnnnnnnnnnnnnnnnnnnnnnnnnnnnnnnnnnnnnnnnnnnnnnnnnnnnnnnnnnnnnnnnnnnnnnnnnnnnnnnnnnnnnnnnnnnnnnnnnnnnnnnnnnnnnnnnnnnnnnnnnnnnnnnnnnnnnnnnnnnnnnnnnnnnnnnnnnnnnnnnnnnnnnnnnnnnnnnnnnnnnnnnnnnnnnnnnnnnnnnnnnnnnnnnnnnnnnnnnnnnnnnnnnnnnnnnnnnnnnnnnnnnnnnnnnnnnnnnnnnnnnnnnnnnnnnnnnnnnnnnnnnnnnnnnnnnnnnnnnnnnnnnnnnnnnnnnnnnnnnnnnnnnnnnnnnnnnnnnnnnnnnnnnnnnnnnnnnnnnnnnnnnnnnnnnnnnnnnnnnnnnnnnnnnnnnnnnnnnnnnnnnnnnnnnnnnnnnnnnnnnnnnnnnnnnnnnnnnnnnnnnnnnnnnnnnnnnnnnnnnnnnnnnnnnnnnnnnnnnnnnnnnnnnnnnnnnnnnnnnnnnnnnnnnnnnnnnnnnnnnnnnnnnnnnnnnnnnnnnnnnnnnnnnnnnnnnnnnnnnnnnnnnnnnnnnnnnnnnnnnnnnnnnnnnnnnnnnnnnnnnnnnnnnnnnnnnnnnnnnnnnnnnnnnnnnnnnnnnnnnnnnnnnnnnnnnnnnnnnnnnnnnnnnnnnnnnnnnnnnnnnnnnnnnnnnnnnnnnnnnnnnnnnnnnnnnnnnnnnnnnnnnnnnnnnnnnnnnnnnnnnnnnnnnnnnnnnnnnnnnnnnnnnnnnnnnnnnnnnnnnnnnnnnnnnnnnnnnnnnnnnnnnnnnnnnnnnnnnnnnnnnnnnnnnnnnnnnnnnnnnnnnnnnnnnnnnnnnnnnnnnnnnnnnnnnnnnnnnnnnnnnnnnnnnnnnnnnnnnnnnnnnnnnnnnnnnnnnnnnnnnnnnnnnnnnnnnnnnnnnnnnnnnnnnnnnnnnnnnnnnnnnnnnnnnnnnnnnnnnnnnnnnnnnnnnnnnnnnnnnnnnnnnnnnnnnnnnnnnnnnnnnnnnnnnnnnnnnnnnnnnnnnnnnnnnnnnnnnnnnnnnnnnnnnnnnnnnnnnnnnnnnnnnnnnnnnnnnnnnnnnnnnnnnnnnnnnnnnnnnnnnnnnnnnnnnnnnnnnnnnnnnnnnnnnnnnnnnnnnnnnnnnnnnnnnnnnnnnnnnnnnnnnnnnnnnnnnnnnnnnnnnnnnnnnnnnnnnnnnnnnnnnnnnnnnnnnnnnnnnnnnnnnnnnnnnnnnnnnnnnnnnnnnnnnnnnnnnnnnnnnnnnnnnnnnnnnnnnnnnnnnnnnnnnnnnnnnnnnnnnnnnnnnnnnnnnnnnnnnnnnnnnnnnnnnnnnnnnnnnnnnnnnnnnnnnnnnnnnnnnnnnnnnnnnnnnnnnnnnnnnnnnnnnnnnnnnnnnnnnnnnnnnnnnnnnnnnnnnnnnnnnnnnnnnnnnnnnnnnnnnnnnnnnnnnnnnnnnnnnnnnnnnnnnnnnnnnnnnnnnnnnnnnnnnnnnnnnnnnnnnnnnnnnnnnnnnnnnnnnnnnnnnnnnnnnnnnnnnnnnnnnnnnnnnnnnnnnnnnnnnnnnnnnnnnnnnnnnnnnnnnnnnnnnnnnnnnnnnnnnnnnnnnnnnnnnnnnnnnnnnnnnnnnnnnnnnnnnnnnnnnnnnnnnnnnnnnnnnnnnnnnnnnnnnnnnnnnnnnnnnnnnnnnnnnnnnnnnnnnnnnnnnnnnnnnnnnnnnnnnnnnnnnnnnnnnnnnnnnnnnnnnnnnnnnnnnnnnnnnnnnnnnnnnnnnnnnnnnnnnnnnnnnnnnnnnnnnnnnnnnnnnnnnnnnnnnnnnnnnnnnnnnnnnnnnnnnnnnnnnnnnnnnnnnnnnnnnnnnnnnnnnnnnnnnnnnnnnnnnnnnnnnnnnnnnnnnnnnnnnnnnnnnnnnnnnnnnnnnnnnnnnnnnnnnnnnnnnnnnnnnnnnnnnnnnnnnnnnnnnnnnnnnnnnnnnnnnnnnnnnnnnnnnnnnnnnnnnnnnnnnnnnnnnnnnnnnnnnnnnnnnnnnnnnnnnnnnnnnnnnnnnnnnnnnnnnnnnnnnnnnnnnnnnnnnnnnnnnnnnnnnnnnnnnnnnnnnnnnnnnnnnnnnnnnnnnnnnnnnnnnnnnnnnnnnnnnnnnnnnnnnnnnnnnnnnnnnnnnnnnnnnnnnnnnnnnnnnnnnnnnnnnnnnnnnnnnnnnnnnnnnnnnnnnnnnnnnnnnnnnnnnnnnnnnnnnnnnnnnnnnnnnnnnnnnnnnnnnnnnnnnnnnnnnnnnnnnnnnnnnnnnnnnnnnnnnnnnnnnnnnnnnnnnnnnnnnnnnnnnnnnnnnnnnnnnnnnnnnnnnnnnnnnnnnnnnnnnnnnnnnnnnnnnnnnnnnnnnnnnnnnnnnnnnnnnnnnnnnnnnnnnnnnnnnnnnnnnnnnnnnnnnnnnnnnnnnnnnnnnnnnnnnnnnnnnnnnnnnnnnnnnnnnnnnnnnnnnnnnnnnnnnnnnnnnnnnnnnnnnnnnnnnnnnnnnnnnnnnnnnnnnnnnnnnnnnnnnnnnnnnnnnnnnnnnnnnnnnnnnnnnnnnnnnnnnnnnnnnnnnnnnnnnnnnnnnnnnnnnnnnnnnnnnnnnnnnnnnnnnnnnnnnnnnnnnnnnnnnnnnnnnnnnnnnnnnnnnnnnnnnnnnnnnnnnnnnnnnnnnnnnnnnnnnnnnnnnnnnnnnnnnnnnnnnnnnnnnnnnnnnnnnnnnnnnnnnnnnnnnnnnnnnnnnnnnnnnnnnnnnnnnnnnnnnnnnnnnnnnnnnnnnnnnnnnnnnnnnnnnnnnnnnnnnnnnnnnnnnnnnnnnnnnnnnnnnnnnnnnnnnnnnnnnnnnnnnnnnnnnnnnnnnnnnnnnnnnnnnnnnnnnnnnnnnnnnnnnnnnnnnnnnnnnnnnnnnnnnnnnnnnnnnnnnnnnnnnnnnnnnnnnnnnnnnnnnnnnnnnnnnnnnnnnnnnnnnnnnnnnnnnnnnnnnnnnnnnnnnnnnnnnnnnnnnnnnnnnnnnnnnnnnnnnnnnnnnnnnnnnnnnnnnnnnnnnnnnnnnnnnnnnnnnnnnnnnnnnnnnnnnnnnnnnnnnnnnnnnnnnnnnnnnnnnnnnnnnnnnnnnnnnnnnnnnnnnnnnnnnnnnnnnnnnnnnnnnnnnnnnnnnnnnnnnnnnnnnnnnnnnnnnnnnnnnnnnnnnnnnnnnnnnnnnnnnnnnnnnnnnnnnnnnnnnnnnnnnnnnnnnnnnnnnnnnnnnnnnnnnnnnnnnnnnnnnnnnnnnnnnnnnnnnnnnnnnnnnnnnnnnnnnnnnnnnnnnnnnnnnnnnnnnnnnnnnnnnnnnnnnnnnnnnnnnnnnnnnnnnnnnnnnnnnnnnnnnnnnnnnnnnnnnnnnnnnnnnnnnnnnnnnnnnnnnnnnnnnnnnnnnnnnnnnnnnnnnnnnnnnnnnnnnnnnnnnnnnnnnnnnnnnnnnnnnnnnnnnnnnnnnnnnnnnnnnnnnnnnnnnnnnnnnnnnnnnnnnnnnnnnnnnnnnnnnnnnnnnnnnnnnnnnnnnnnnnnnnnnnnnnnnnnnnnnnnnnnnnnnnnnnnnnnnnnnnnnnnnnnnnnnnnnnnnnnnnnnnnnnnnnnnnnnnnnnnnnnnnnnnnnnnnnnnnnnnnnnnnnnnnnnnnnnnnnnnnnnnnnnnnnnnnnnnnnnnnnnnnnnnnnnnnnnnnnnnnnnnnnnnnnnnnnnnnnnnnnnnnnnnnnnnnnnnnnnnnnnnnnnnnnnnnnnnnnnnnnnnnnnnnnnnnnnnnnnnnnnnnnnnnnnnnnnnnnnnnnnnnnnnnnnnnnnnnnnnnnnnnnnnnnnnnnnnnnnnnnnnnnnnnnnnnnnnnnnnnnnnnnnnnnnnnnnnnnnnnnnnnnnnnnnnnnnnnnnnnnnnnnnnnnnnnnnnnnnnnnnnnnnnnnnnnnnnnnnnnnnnnnnnnnnnnnnnnnnnnnnnnnnnnnnnnnnnnnnnnnnnnnnnnnnnnnnnnnnnnnnnnnnnnnnnnnnnnnnnnnnnnnnnnnnnnnnnnnnnnnnnnnnnnnnnnnnnnnnnnnnnnnnnnnnnnnnnnnnnnnnnnnnnnnnnnnnnnnnnnnnnnnnnnnnnnnnnnnnnnnnnnnnnnnnnnnnnnnnnnnnnnnnnnnnnnnnnnnnnnnnnnnnnnnnnnnnnnnnnnnnnnnnnnnnnnnnnnnnnnnnnnnnnnnnnnnnnnnnnnnnnnnnnnnnnnnnnnnnnnnnnnnnnnnnnnnnnnnnnnnnnnnnnnnnnnnnnnnnnnnnnnnnnnnnnnnnnnnnnnnnnnnnnnnnnnnnnnnnnnnnnnnnnnnnnnnnnnnnnnnnnnnnnnnnnnnnnnnnnnnnnnnnnnnnnnnnnnnnnnnnnnnnnnnnnnnnnnnnnnnnnnnnnnnnnnnnnnnnnnnnnnnnnnnnnnnnnnnnnnnnnnnnnnnnnnnnnnnnnnnnnnnnnnnnnnnnnnnnnnnnnnnnnnnnnnnnnnnnnnnnnnnnnnnnnnnnnnnnnnnnnnnnnnnnnnnnnnnnnnnnnnnnnnnnnnnnnnnnnnnnnnnnnnnnnnnnnnnnnnnnnnnnnnnnnnnnnnnnnnnnnnnnnnnnnnnnnnnnnnnnnnnnnnnnnnnnnnnnnnnnnnnnnnnnnnnnnnnnnnnnnnnnnnnnnnnnnnnnnnnnnnnnnnnnnnnnnnnnnnnnnnnnnnnnnnnnnnnnnnnnnnnnnnnnnnnnnnnnnnnnnnnnnnnnnnnnnnnnnnnnnnnnnnnnnnnnnnnnnnnnnnnnnnnnnnnnnnnnnnnnnnnnnnnnnnnnnnnnnnnnnnnnnnnnnnnnnnnnnnnnnnnnnnnnnnnnnnnnnnnnnnnnnnnnnnnnnnnnnnnnnnnnnnnnnnnnnnnnnnnnnnnnnnnnnnnnnnnnnnnnnnnnnnnnnnnnnnnnnnnnnnnnnnnnnnnnnnnnnnnnnnnnnnnnnnnnnnnnnnnnnnnnnnnnnnnnnnnnnnnnnnnnnnnnnnnnnnnnnnnnnnnnnnnnnnnnnnnnnnnnnnnnnnnnnnnnnnnnnnnnnnnnnnnnnnnnnnnnnnnnnnnnnnnnnnnnnnnnnnnnnnnnnnnnnnnnnnnnnnnnnnnnnnnnnnnnnnnnnnnnnnnnnnnnnnnnnnnnnnnnnnnnnnnnnnnnnnnnnnnnnnnnnnnnnnnnnnnnnnnnnnnnnnnnnnnnnnnnnnnnnnnnnnnnnnnnnnnnnnnnnnnnnnnnnnnnnnnnnnnnnnnnnnnnnnnnnnnnnnnnnnnnnnnnnnnnnnnnnnnnnnnnnnnnnnnnnnnnnnnnnnnnnnnnnnnnnnnnnnnnnnnnnnnnnnnnnnnnnnnnnnnnnnnnnnnnnnnnnnnnnnnnnnnnnnnnnnnnnnnnnnnnnnnnnnnnnnnnnnnnnnnnnnnnnnnnnnnnnnnnnnnnnnnnnnnnnnnnnnnnnnnnnnnnnnnnnnnnnnnnnnnnnnnnnnnnnnnnnnnnnnnnnnnnnnnnnnnnnnnnnnnnnnnnnnnnnnnnnnnnnnnnnnnnnnnnnnnnnnnnnnnnnnnnnnnnnnnnnnnnnnnnnnnnnnnnnnnnnnnnnnnnnnnnnnnnnnnnnnnnnnnnnnnnnnnnnnnnnnnnnnnnnnnnnnnnnnnnnnnnnnnnnnnnnnnnnnnnnnnnnnnnnnnnnnnnnnnnnnnnnnnnnnnnnnnnnnnnnnnnnnnnnnnnnnnnnnnnnnnnnnnnnnnnnnnnnnnnnnnnnnnnnnnnnnnnnnnnnnnnnnnnnnnnnnnnnnnnnnnnnnnnnnnnnnnnnnnnnnnnnnnnnnnnnnnnnnnnnnnnnnnnnnnnnnnnnnnnnnnnnnnnnnnnnnnnnnnnnnnnnnnnnnnnnnnnnnnnnnnnnnnnnnnnnnnnnnnnnnnnnnnnnnnnnnnnnnnnnnnnnnnnnnnnnnnnnnnnnnnnnnnnnnnnnnnnnnnnnnnnnnnnnnnnnnnnnnnnnnnnnnnnnnnnnnnnnnnnnnnnnnnnnnnnnnnnnnnnnnnnnnnnnnnnnnnnnnnnnnnnnnnnnnnnnnnnnnnnnnnnnnnnnnnnnnnnnnnnnnnnnnnnnnnnnnnnnnnnnnnnnnnnnnnnnnnnnnnnnnnnnnnnnnnnnnnnnnnnnnnnnnnnnnnnnnnnnnnnnnnnnnnnnnnnnnnnnnnnnnnnnnnnnnnnnnnnnnnnnnnnnnnnnnnnnnnnnnnnnnnnnnnnnnnnnnnnnnnnnnnnnnnnnnnnnnnnnnnnnnnnnnnnnnnnnnnnnnnnnnnnnnnnnnnnnnnnnnnnnnnnnnnnnnnnnnnnnnnnnnnnnnnnnnnnnnnnnnnnnnnnnnnnnnnnnnnnnnnnnnnnnnnnnnnnnnnnnnnnnnnnnnnnnnnnnnnnnnnnnnnnnnnnnnnnnnnnnnnnnnnnnnnnnnnnnnnnnnnnnnnnnnnnnnnnnnnnnnnnnnnnnnnnnnnnnnnnnnnnnnnnnnnnnnnnnnnnnnnnnnnnnnnnnnnnnnnnnnnnnnnnnnnnnnnnnnnnnnnnnnnnnnnnnnnnnnnnnnnnnnnnnnnnnnnnnnnnnnnnnnnnnnnnnnnnnnnnnnnnnnnnnnnnnnnnnnnnnnnnnnnnnnnnnnnnnnnnnnnnnnnnnnnnnnnnnnnnnnnnnnnnnnnnnnnnnnnnnnnnnnnnnnnnnnnnnnnnnnnnnnnnnnnnnnnnnnnnnnnnnnnnnnnnnnnnnnnnnnnnnnnnnnnnnnnnnnnnnnnnnnnnnnnnnnnnnnnnnnnnnnnnnnnnnnnnnnnnnnnnnnnnnnnnnnnnnnnnnnnnnnnnnnnnnnnnnnnnnnnnnnnnnnnnnnnnnnnnnnnnnnnnnnnnnnnnnnnnnnnnnnnnnnnnnnnnnnnnnnnnnnnnnnnnnnnnnnnnnnnnnnnnnnnnnnnnnnnnnnnnnnnnnnnnnnnnnnnnnnnnnnnnnnnnnnnnnnnnnnnnnnnnnnnnnnnnnnnnnnnnnnnnnnnnnnnnnnnnnnnnnnnnnnnnnnnnnnnnnnnnnnnnnnnnnnnnnnnnnnnnnnnnnnnnnnnnnnnnnnnnnnnnnnnnnnnnnnnnnnnnnnnnnnnnnnnnnnnnnnnnnnnnnnnnnnnnnnnnnnnnnnnnnnnnnnnnnnnnnnnnnnnnnnnnnnnnnnnnnnnnnnnnnnnnnnnnnnnnnnnnnnnnnnnnnnnnnnnnnnnnnnnnnnnnnnnnnnnnnnnnnnnnnnnnnnnnnnnnnnnnnnnnnnnnnnnnnnnnnnnnnnnnnnnnnnnnnnnnnnnnnnnnnnnnnnnnnnnnnnnnnnnnnnnnnnnnnnnnnnnnnnnnnnnnnnnnnnnnnnnnnnnnnnnnnnnnnnnnnnnnnnnnnnnnnnnnnnnnnnnnnnnnnnnnnnnnnnnnnnnnnnnnnnnnnnnnnnnnnnnnnnnnnnnnnnnnnnnnnnnnnnnnnnnnnnnnnnnnnnnnnnnnnnnnnnnnnnnnnnnnnnnnnnnnnnnnnnnnnnnnnnnnnnnnnnnnnnnnnnnnnnnnnnnnnnnnnnnnnnnnnnnnnnnnnnnnnnnnnnnnnnnnnnnnnnnnnnnnnnnnnnnnnnnnnnnnnnnnnnnnnnnnnnnnnnnnnnnnnnnnnnnnnnnnnnnnnnnnnnnnnnnnnnnnnnnnnnnnnnnnnnnnnnnnnnnnnnnnnnnnnnnnnnnnnnnnnnnnnnnnnnnnnnnnnnnnnnnnnnnnnnnnnnnnnnnnnnnnnnnnnnnnnnnnnnnnnnnnnnnnnnnnnnnnnnnnnnnnnnnnnnnnnnnnnnnnnnnnnnnnnnnnnnnnnnnnnnnnnnnnnnnnnnnnnnnnnnnnnnnnnnnnnnnnnnnnnnnnnnnnnnnnnnnnnnnnnnnnnnnnnnnnnnnnnnnnnnnnnnnnnnnnnnnnnnnnnnnnnnnnnnnnnnnnnnnnnnnnnnnnnnnnnnnnnnnnnnnnnnnnnnnnnnnnnnnnnnnnnnnnnnnnnnnnnnnnnnnnnnnnnnnnnnnnnnnnnnnnnnnnnnnnnnnnnnnnnnnnnnnnnnnnnnnnnnnnnnnnnnnnnnnnnnnnnnnnnnnnnnnnnnnnnnnnnnnnnnnnnnnnnnnnnnnnnnnnnnnnnnnnnnnnnnnnnnnnnnnnnnnnnnnnnnnnnnnnnnnnnnnnnnnnnnnnnnnnnnnnnnnnnnnnnnnnnnnnnnnnnnnnnnnnnnnnnnnnnnnnnnnnnnnnnnnnnnnnnnnnnnnnnnnnnnnnnnnnnnnnnnnnnnnnnnnnnnnnnnnnnnnnnnnnnnnnnnnnnnnnnnnnnnnnnnnnnnnnnnnnnnnnnnnnnnnnnnnnnnnnnnnnnnnnnnnnnnnnnnnnnnnnnnnnnnnnnnnnnnnnnnnnnnnnnnnnnnnnnnnnnnnnnnnnnnnnnnnnnnnnnnnnnnnnnnnnnnnnnnnnnnnnnnnnnnnnnnnnnnnnnnnnnnnnnnnnnnnnnnnnnnnnnnnnnnnnnnnnnnnnnnnnnnnnnnnnnnnnnnnnnnnnnnnnnnnnnnnnnnnnnnnnnnnnnnnnnnnnnnnnnnnnnnnnnnnnnnnnnnnnnnnnnnnnnnnnnnnnnnnnnnnnnnnnnnnnnnnnnnnnnnnnnnnnnnnnnnnnnnnnnnnnnnnnnnnnnnnnnnnnnnnnnnnnnnnnnnnnnnnnnnnnnnnnnnnnnnnnnnnnnnnnnnnnnnnnnnnnnnnnnnnnnnnnnnnnnnnnnnnnnnnnnnnnnnnnnnnnnnnnnnnnnnnnnnnnnnnnnnnnnnnnnnnnnnnnnnnnnnnnnnnnnnnnnnnnnnnnnnnnnnnnnnnnnnnnnnnnnnnnnnnnnnnnnnnnnnnnnnnnnnnnnnnnnnnnnnnnnnnnnnnnnnnnnnnnnnnnnnnnnnnnnnnnnnnnnnnnnnnnnnnnnnnnnnnnnnnnnnnnnnnnnnnnnnnnnnnnnnnnnnnnnnnnnnnnnnnnnnnnnnnnnnnnnnnnnnnnnnnnnnnnnnnnnnnnnnnnnnnnnnnnnnnnnnnnnnnnnnnnnnnnnnnnnnnnnnnnnnnnnnnnnnnnnnnnnnnnnnnnnnnnnnnnnnnnnnnnnnnnnnnnnnnnnnnnnnnnnnnnnnnnnnnnnnnnnnnnnnnnnnnnnnnnnnnnnnnnnnnnnnnnnnnnnnnnnnnnnnnnnnnnnnnnnnnnnnnnnnnnnnnnnnnnnnnnnnnnnnnnnnnnnnnnnnnnnnnnnnnnnnnnnnnnnnnnnnnnnnnnnnnnnnnnnnnnnnnnnnnnnnnnnnnnnnnnnnnnnnnnnnnnnnnnnnnnnnnnnnnnnnnnnnnnnnnnnnnnnnnnnnnnnnnnnnnnnnnnnnnnnnnnnnnnnnnnnnnnnnnnnnnnnnnnnnnnnnnnnnnnnnnnnnnnnnnnnnnnnnnnnnnnnnnnnnnnnnnnnnnnnnnnnnnnnnnnnnnnnnnnnnnnnnnnnnnnnnnnnnnnnnnnnnnnnnnnnnnnnnnnnnnnnnnnnnnnnnnnnnnnnnnnnnnnnnnnnnnnnnnnnnnnnnnnnnnnnnnnnnnnnnnnnnnnnnnnnnnnnnnnnnnnnnnnnnnnnnnnnnnnnnnnnnnnnnnnnnnnnnnnnnnnnnnnnnnnnnnnnnnnnnnnnnnnnnnnnnnnnnnnnnnnnnnnnnnnnnnnnnnnnnnnnnnnnnnnnnnnnnnnnnnnnnnnnnnnnnnnnnnnnnnnnnnnnnnnnnnnnnnnnnnnnnnnnnnnnnnnnnnnnnnnnnnnnnnnnnnnnnnnnnnnnnnnnnnnnnnnnnnnnnnnnnnnnnnnnnnnnnnnnnnnnnnnnnnnnnnnnnnnnnnnnnnnnnnnnnnnnnnnnnnnnnnnnnnnnnnnnnnnnnnnnnnnnnnnnnnnnnnnnnnnnnnnnnnnnnnnnnnnnnnnnnnnnnnnnnnnnnnnnnnnnnnnnnnnnnnnnnnnnnnnnnnnnnnnnnnnnnnnnnnnnnnnnnnnnnnnnnnnnnnnnnnnnnnnnnnnnnnnnnnnnnnnnnnnnnnnnnnnnnnnnnnnnnnnnnnnnnnnnnnnnnnnnnnnnnnnnnnnnnnnnnnnnnnnnnnnnnnnnnnnnnnnnnnnnnnnnnnnnnnnnnnnnnnnnnnnnnnnnnnnnnnnnnnnnnnnnnnnnnnnnnnnnnnnnnnnnnnnnnnnnnnnnnnnnnnnnnnnnnnnnnnnnnnnnnnnnnnnnnnnnnnnnnnnnnnnnnnnnnnnnnnnnnnnnnnnnnnnnnnnnnnnnnnnnnnnnnnnnnnnnnnnnnnnnnnnnnnnnnnnnnnnnnnnnnnnnnnnnnnnnnnnnnnnnnnnnnnnnnnnnnnnnnnnnnnnnnnnnnnnnnnnnnnnnnnnnnnnnnnnnnnnnnnnnnnnnnnnnnnnnnnnnnnnnnnnnnnnnnnnnnnnnnnnnnnnnnnnnnnnnnnnnnnnnnnnnnnnnnnnnnnnnnnnnnnnnnnnnnnnnnnnnnnnnnnnnnnnnnnnnnnnnnnnnnnnnnnnnnnnnnnnnnnnnnnnnnnnnnnnnnnnnnnnnnnnnnnnnnnnnnnnnnnnnnnnnnnnnnnnnnnnnnnnnnnnnnnnnnnnnnnnnnnnnnnnnnnnnnnnnnnnnnnnnnnnnnnnnnnnnnnnnnnnnnnnnnnnnnnnnnnnnnnnnnnnnnnnnnnnnnnnnnnnnnnnnnnnnnnnnnnnnnnnnnnnnnnnnnnnnnnnnnnnnnnnnnnnnnnnnnnnnnnnnnnnnnnnnnnnnnnnnnnnnnnnnnnnnnnnnnnnnnnnnnnnnnnnnnnnnnnnnnnnnnnnnnnnnnnnnnnnnnnnnnnnnnnnnnnnnnnnnnnnnnnnnnnnnnnnnnnnnnnnnnnnnnnnnnnnnnnnnnnnnnnnnnnnnnnnnnnnnnnnnnnnnnnnnnnnnnnnnnnnnnnnnnnnnnnnnnnnnnnnnnnnnnnnnnnnnnnnnnnnnnnnnnnnnnnnnnnnnnnnnnnnnnnnnnnnnnnnnnnnnnnnnnnnnnnnnnnnnnnnnnnnnnnnnnnnnnnnnnnnnnnnnnnnnnnnnnnnnnnnnnnnnnnnnnnnnnnnnnnnnnnnnnnnnnnnnnnnnnnnnnnnnnnnnnnnnnnnnnnnnnnnnnnnnnnnnnnnnnnnnnnnnnnnnnnnnnnnnnnnnnnnnnnnnnnnnnnnnnnnnnnnnnnnnnnnnnnnnnnnnnnnnnnnnnnnnnnnnnnnnnnnnnnnnnnnnnnnnnnnnnnnnnnnnnnnnnnnnnnnnnnnnnnnnnnnnnnnnnnnnnnnnnnnnnnnnnnnnnnnnnnnnnnnnnnnnnnnnnnnnnnnnnnnnnnnnnnnnnnnnnnnnnnnnnnnnnnnnnnnnnnnnnnnnnnnnnnnnnnnnnnnnnnnnnnnnnnnnnnnnnnnnnnnnnnnnnnnnnnnnnnnnnnnnnnnnnnnnnnnnnnnnnnnnnnnnnnnnnnnnnnnnnnnnnnnnnnnnnnnnnnnnnnnnnnnnnnnnnnnnnnnnnnnnnnnnnnnnnnnnnnnnnnnnnnnnnnnnnnnnnnnnnnnnnnnnnnnnnnnnnnnnnnnnnnnnnnnnnnnnnnnnnnnnnnnnnnnnnnnnnnnnnnnnnnnnnnnnnnnnnnnnnnnnnnnnnnnnnnnnnnnnnnnnnnnnnnnnnnnnnnnnnnnnnnnnnnnnnnnnnnnnnnnnnnnnnnnnnnnnnnnnnnnnnnnnnnnnnnnnnnnnnnnnnnnnnnnnnnnnnnnnnnnnnnnnnnnnnnnnnnnnnnnnnnnnnnnnnnnnnnnnnnnnnnnnnnnnnnnnnnnnnnnnnnnnnnnnnnnnnnnnnnnnnnnnnnnnnnnnnnnnnnnnnnnnnnnnnnnnnnnnnnnnnnnnnnnnnnnnnnnnnnnnnnnnnnnnnnnnnnnnnnnnnnnnnnnnnnnnnnnnnnnnnnnnnnnnnnnnnnnnnnnnnnnnnnnnnnnnnnnnnnnnnnnnnnnnnnnnnnnnnnnnnnnnnnnnnnnnnnnnnnnnnnnnnnnnnnnnnnnnnnnnnnnnnnnnnnnnnnnnnnnnnnnnnnnnnnnnnnnnnnnnnnnnnnnnnnnnnnnnnnnnnnnnnnnnnnnnnnnnnnnnnnnnnnnnnnnnnnnnnnnnnnnnnnnnnnnnnnnnnnnnnnnnnnnnnnnnnnnnnnnnnnnnnnnnnnnnnnnnnnnnnnnnnnnnnnnnnnnnnnnnnnnnnnnnnnnnnnnnnnnnnnnnnnnnnnnnnnnnnnnnnnnnnnnnnnnnnnnnnnnnnnnnnnnnnnnnnnnnnnnnnnnnnnnnnnnnnnnnnnnnnnnnnnnnnnnnnnnnnnnnnnnnnnnnnnnnnnnnnnnnnnnnnnnnnnnnnnnnnnnnnnnnnnnnnnnnnnnnnnnnnnnnnnnnnnnnnnnnnnnnnnnnnnnnnnnnnnnnnnnnnnnnnnnnnnnnnnnnnnnnnnnnnnnnnnnnnnnnnnnnnnnnnnnnnnnnnnnnnnnnnnnnnnnnnnnnnnnnnnnnnnnnnnnnnnnnnnnnnnnnnnnnnnnnnnnnnnnnnnnnnnnnnnnnnnnnnnnnnnnnnnnnnnnnnnnnnnnnnnnnnnnnnnnnnnnnnnnnnnnnnnnnnnnnnnnnnnnnnnnnnnnnnnnnnnnnnnnnnnnnnnnnnnnnnnnnnnnnnnnnnnnnnnnnnnnnnnnnnnnnnnnnnnnnnnnnnnnnnnnnnnnnnnnnnnnnnnnnnnnnnnnnnnnnnnnnnnnnnnnnnnnnnnnnnnnnnnnnnnnnnnnnnnnnnnnnnnnnnnnnnnnnnnnnnnnnnnnnnnnnnnnnnnnnnnnnnnnnnnnnnnnnnnnnnnnnnnnnnnnnnnnnnnnnnnnnnnnnnnnnnnnnnnnnnnnnnnnnnnnnnnnnnnnnnnnnnnnnnnnnnnnnnnnnnnnnnnnnnnnnnnnnnnnnnnnnnnnnnnnnnnnnnnnnnnnnnnnnnnnnnnnnnnnnnnnnnnnnnnnnnnnnnnnnnnnnnnnnnnnnnnnnnnnnnnnnnnnnnnnnnnnnnnnnnnnnnnnnnnnnnnnnnnnnnnnnnnnnnnnnnnnnnnnnnnnnnnnnnnnnnnnnnnnnnnnnnnnnnnnnnnnnnnnnnnnnnnnnnnnnnnnnnnnnnnnnnnnnnnnnnnnnnnnnnnnnnnnnnnnnnnnnnnnnnnnnnnnnnnnnnnnnnnnnnnnnnnnnnnnnnnnnnnnnnnnnnnnnnnnnnnnnnnnnnnnnnnnnnnnnnnnnnnnnnnnnnnnnnnnnnnnnnnnnnnnnnnnnnnnnnnnnnnnnnnnnnnnnnnnnnnnnnnnnnnnnnnnnnnnnnnnnnnnnnnnnnnnnnnnnnnnnnnnnnnnnnnnnnnnnnnnnnnnnnnnnnnnnnnnnnnnnnnnnnnnnnnnnnnnnnnnnnnnnnnnnnnnnnnnnnnnnnnnnnnnnnnnnnnnnnnnnnnnnnnnnnnnnnnnnnnnnnnnnnnnnnnnnnnnnnnnnnnnnnnnnnnnnnnnnnnnnnnnnnnnnnnnnnnnnnnnnnnnnnnnnnnnnnnnnnnnnnnnnnnnnnnnnnnnnnnnnnnnnnnnnnnnnnnnnnnnnnnnnnnnnnnnnnnnnnnnnnnnnnnnnnnnnnnnnnnnnnnnnnnnnnnnnnnnnnnnnnnnnnnnnnnnnnnnnnnnnnnnnnnnnnnnnnnnnnnnnnnnnnnnnnnnnnnnnnnnnnnnnnnnnnnnnnnnnnnnnnnnnnnnnnnnnnnnnnnnnnnnnnnnnnnnnnnnnnnnnnnnnnnnnnnnnnnnnnnnnnnnnnnnnnnnnnnnnnnnnnnnnnnnnnnnnnnnnnnnnnnnnnnnnnnnnnnnnnnnnnnnnnnnnnnnnnnnnnnnnnnnnnnnnnnnnnnnnnnnnnnnnnnnnnnnnnnnnnnnnnnnnnnnnnnnnnnnnnnnnnnnnnnnnnnnnnnnnnnnnnnnnnnnnnnnnnnnnnnnnnnnnnnnnnnnnnnnnnnnnnnnnnnnnnnnnnnnnnnnnnnnnnnnnnnnnnnnnnnnnnnnnnnnnnnnnnnnnnnnnnnnnnnnnnnnnnnnnnnnnnnnnnnnnnnnnnnnnnnnnnnnnnnnnnnnnnnnnnnnnnnnnnnnnnnnnnnnnnnnnnnnnnnnnnnnnnnnnnnnnnnnnnnnnnnnnnnnnnnnnnnnnnnnnnnnnnnnnnnnnnnnnnnnnnnnnnnnnnnnnnnnnnnnnnnnnnnnnnnnnnnnnnnnnnnnnnnnnnnnnnnnnnnnnnnnnnnnnnnnnnnnnnnnnnnnnnnnnnnnnnnnnnnnnnnnnnnnnnnnnnnnnnnnnnnnnnnnnnnnnnnnnnnnnnnnnnnnnnnnnnnnnnnnnnnnnnnnnnnnnnnnnnnnnnnnnnnnnnnnnnnnnnnnnnnnnnnnnnnnnnnnnnnnnnnnnnnnnnnnnnnnnnnnnnnnnnnnnnnnnnnnnnnnnnnnnnnnnnnnnnnnnnnnnnnnnnnnnnnnnnnnnnnnnnnnnnnnnnnnnnnnnnnnnnnnnnnnnnnnnnnnnnnnnnnnnnnnnnnnnnnnnnnnnnnnnnnnnnnnnnnnnnnnnnnnnnnnnnnnnnnnnnnnnnnnnnnnnnnnnnnnnnnnnnnnnnnnnnnnnnnnnnnnnnnnnnnnnnnnnnnnnnnnnnnnnnnnnnnnnnnnnnnnnnnnnnnnnnnnnnnnnnnnnnnnnnnnnnnnnnnnnnnnnnnnnnnnnnnnnnnnnnnnnnnnnnnnnnnnnnnnnnnnnnnnnnnnnnnnnnnnnnnnnnnnnnnnnnnnnnnnnnnnnnnnnnnnnnnnnnnnnnnnnnnnnnnnnnnnnnnnnnnnnnnnnnnnnnnnnnnnnnnnnnnnnnnnnnnnnnnnnnnnnnnnnnnnnnnnnnnnnnnnnnnnnnnnnnnnnnnnnnnnnnnnnnnnnnnnnnnnnnnnnnnnnnnnnnnnnnnnnnnnnnnnnnnnnnnnnnnnnnnnnnnnnnnnnnnnnnnnnnnnnnnnnnnnnnnnnnnnnnnnnnnnnnnnnnnnnnnnnnnnnnnnnnnnnnnnnnnnnnnnnnnnnnnnnnnnnnnnnnnnnnnnnnnnnnnnnnnnnnnnnnnnnnnnnnnnnnnnnnnnnnnnnnnnnnnnnnnnnnnnnnnnnnnnnnnnnnnnnnnnnnnnnnnnnnnnnnnnnnnnnnnnnnnnnnnnnnnnnnnnnnnnnnnnnnnnnnnnnnnnnnnnnnnnnnnnnnnnnnnnnnnnnnnnnnnnnnnnnnnnnnnnnnnnnnnnnnnnnnnnnnnnnnnnnnnnnnnnnnnnnnnnnnnnnnnnnnnnnnnnnnnnnnnnnnnnnnnnnnnnnnnnnnnnnnnnnnnnnnnnnnnnnnnnnnnnnnnnnnnnnnnnnnnnnnnnnnnnnnnnnnnnnnnnnnnnnnnnnnnnnnnnnnnnnnnnnnnnnnnnnnnnnnnnnnnnnnnnnnnnnnnnnnnnnnnnnnnnnnnnnnnnnnnnnnnnnnnnnnnnnnnnnnnnnnnnnnnnnnnnnnnnnnnnnnnnnnnnnnnnnnnnnnnnnnnnnnnnnnnnnnnnnnnnnnnnnnnnnnnnnnnnnnnnnnnnnnnnnnnnnnnnnnnnnnnnnnnnnnnnnnnnnnnnnnnnnnnnnnnnnnnnnnnnnnnnnnnnnnnnnnnnnnnnnnnnnnnnnnnnnnnnnnnnnnnnnnnnnnnnnnnnnnnnnnnnnnnnnnnnnnnnnnnnnnnnnnnnnnnnnnnnnnnnnnnnnnnnnnnnnnnnnnnnnnnnnnnnnnnnnnnnnnnnnnnnnnnnnnnnnnnnnnnnnnnnnnnnnnnnnnnnnnnnnnnnnnnnnnnnnnnnnnnnnnnnnnnnnnnnnnnnnnnnnnnnnnnnnnnnnnnnnnnnnnnnnnnnnnnnnnnnnnnnnnnnnnnnnnnnnnnnnnnnnnnnnnnnnnnnnnnnnnnnnnnnnnnnnnnnnnnnnnnnnnnnnnnnnnnnnnnnnnnnnnnnnnnnnnnnnnnnnnnnnnnnnnnnnnnnnnnnnnnnnnnnnnnnnnnnnnnnnnnnnnnnnnnnnnnnnnnnnnnnnnnnnnnnnnnnnnnnnnnnnnnnnnnnnnnnnnnnnnnnnnnnnnnnnnnnnnnnnnnnnnnnnnnnnnnnnnnnnnngctcttcnngaagagcttc

SEQ ID NO: 27 - DNA, 36 bp, Artificial Sequence
  source: /note="Description of Artificial Sequence: Synthetic oligonucleotide"
  modified_base (11)..(12): a, c, t, or g
  modified_base (25)..(26): a, c, t, or g
gaagctcttcnngaagagctcttcnngaagagcttc

SEQ ID NO: 28 - DNA, 3392 bp, Artificial Sequence
  source: /note="Description of Artificial Sequence: Synthetic polynucleotide"
cactctgtgacttggtctcactcctgagaccgtcagaccaagtttactcatatatactttagattgatttaaaacttcatttttaatttaaaaggatctaggtgaagatcctttttgataatctcatgaccaaaatcccttaacgtgagttttcgttccactgagcgtcagaccccgtagaaaagatcaaaggatcttcttgagatcctttttttctgcgcgtaatctgctgcttgcaaacaaaaaaaccaccgctaccagcggtggtttgtttgccggatcaagagctaccaactctttttccgaaggtaactggcttcagcagagcgcagataccaaatactgtccttctagtgtagccgtagttaggccaccacttcaagaactctgtagcaccgcctacatacctcgctctgctaatcctgttaccagtggctgctgccagtggcgataagtcgtgtcttaccgggttggactcaagacgatagttaccggataaggcgcagcggtcgggctgaacggggggttcgtgcacacagcccagcttggagcgaacgacctacaccgaactgagatacctacagcgtgagctatgagaaagcgccacgcttcccgaagggagaaaggcggacaggtatccggtaagcggcagggtcggaacaggagagcgcacgagggagcttccagggggaaacgcctggtatctttatagtcctgtcgggtttcgccacctctgacttgagcgtcgatttttgtgatgctcgtcaggggggcggagcctatggaaaaacgccagcaacgcggcctttttacggttcctggccttttgctggccttttgctcacatgttctttcctgcgttatcccctgattctgtggataaccgtattaccgcctttgagtgagctgataccgctcgccgcagccgaacgaccgagcgcagcgagtcagtgagcgaggaagcggatgagcgcccaatacgcaaaccgcctctccccgcgcgttggccgattcattaatgcagctggcacgacaggtttcccgactggaaagcgggcagtgagcgcaacgcaattaatgtgagttagctcactcattaggcaccccaggctttacactttatgcttccggctcgtatgttgtgtggaattgtgagcggataacaatttcacacaggaaacagctatgaccatgattacgccaagcttgcatgcctgcaggtcgactctagaggatccccgggtaccgagctcgaattcactggccgtcgttttacaacgtcgtgactgggaaaaccctggcgttacccaacttaatcgccttgcagcacatccccctttcgccagctggcgtaatagcgaagaggcccgcaccgatcgcccttcccaacagttgcgcagcctgaatggcgaatggcgcctgatgcggtattttctccttacgcatctgtgcggtatttcacaccgcatatggtgcactctcagtacaatctgctctgatgccgcatagttaagccagccccgacacccgccaacacccgctgacgcgccctgacgggcttgtctgctcccggcatccgcttacagacaagctgtgacggtctcacgagaccaagtcacgaagtgtgcggccgccttcgtgcgcggaacccctatttgtttatttttctaaatacattcaaatatgtatccgctcatgagacaataaccctgataaatgcttcaataatattgaaaaaggaagagtatggctaaaatgagaatatcaccggaattgaaaaaactgatcgaaaaataccgctgcgtaaaagatacggaaggaatgtctcctgctaaggtatataagctggtgggagaaaatgaaaacctatatttaaaaatgacggacagccggtataaagggaccacctatgatgtggaacgggaaaaggacatgatgctatggctggaaggaaagctgcctgttccaaaggtcctgcactttgaacggcatgatggctggagcaatctgctcatgagtgaggccgatggcgtcctttgctcggaagagtatgaagatgaacaaagccctgaaaagattatcgagctgtatgcggagtgcatcaggctctttcactccatcgacatatcggattgtccctatacgaatagcttagacagccgcttagccgaattggattacttactgaataacgatctggccgatgtggattgcgaaaactgggaagaggacactccatttaaagatccgcgcgagctgtatgattttttaaagacggaaaagcccgaagaggaacttgtcttttcccacggcgacctgggagacagcaacatctttgtgaaagatggcaaagtaagtggctttattgatcttgggagaagcggcagggcggacaagtggtatgacattgccttctgcgtccggtcgctcagggaggatatcggggaagaacagtatgtcgagctattttttgacttactggggatcaagcctgattgggagaaaataaaatattatattttactggatgaattgttttaggagcctgtttaataagatgatcttcttgagatcgttttggtctgcgcgtaatctcttgctctgaaaacgaaaaaaccgccttgcagggcggtttttcgaaggttctctgagctaccaactctttgaaccgaggtaactggcttggaggagcgcagtcaccaaaacttgtcctttcagtttagccttaaccggcgcatgacttcaagactaactcctctaaatcaattaccagtggctgctgccagtggtgcttttgcatgtctttccgggttggactcaagacgatagttaccggataaggcgcagcggtcggactgaacggggggttcgtgcatacagtccagcttggagcgaactgcctacccggaactgagtgtcaggcgtggaatgagacaaacgcggccataacagcggaatgacaccggtaaaccgaaaggcaggaacaggagagcgcacgagggagccgccagggggaaacgcctggtatctttatagtcctgtcgggtttcgccaccactgatttgagcgtcagatttcgtgatgcttgtcaggggggcggagcctatggaaaaacggctttgccgcggccctctcacttccctgttaagtatcttcctggcatcttccaggaaatctccgccccgttcgtaagccatttccgctcgccgcagtcgaacgaccgagcgtagcgagtcagtgagcgaggaagcggaatatatcctgtatcacatattctgctgacgcaccggtgcagccttttttctcctgccacatgaagcacttcactgacaccctcatcagtgccaacatagtaagccagtatacactccgctagcgcgcaagcggccgca

SEQ ID NO: 29 - DNA, 3388 bp, Artificial Sequence
  source: /note="Description of Artificial Sequence: Synthetic polynucleotide"
cactctgtgacttggtctcctgagaccgtcagaccaagtttactcatatatactttagattgatttaaaacttcatttttaatttaaaaggatctaggtgaagatcctttttgataatctcatgaccaaaatcccttaacgtgagttttcgttccactgagcgtcagaccccgtagaaaagatcaaaggatcttcttgagatcctttttttctgcgcgtaatctgctgcttgcaaacaaaaaaaccaccgctaccagcggtggtttgtttgccggatcaagagctaccaactctttttccgaaggtaactggcttcagcagagcgcagataccaaatactgtccttctagtgtagccgtagttaggccaccacttcaagaactctgtagcaccgcctacatacctcgctctgctaatcctgttaccagtggctgctgccagtggcgataagtcgtgtcttaccgggttggactcaagacgatagttaccggataaggcgcagcggtcgggctgaacggggggttcgtgcacacagcccagcttggagcgaacgacctacaccgaactgagatacctacagcgtgagctatgagaaagcgccacgcttcccgaagggagaaaggcggacaggtatccggtaagcggcagggtcggaacaggagagcgcacgagggagcttccagggggaaacgcctggtatctttatagtcctgtcgggtttcgccacctctgacttgagcgtcgatttttgtgatgctcgtcaggggggcggagcctatggaaaaacgccagcaacgcggcctttttacggttcctggccttttgctggccttttgctcacatgttctttcctgcgttatcccctgattctgtggataaccgtattaccgcctttgagtgagctgataccgctcgccgcagccgaacgaccgagcgcagcgagtcagtgagcgaggaagcggatgagcgcccaatacgcaaaccgcctctccccgcgcgttggccgattcattaatgcagctggcacgacaggtttcccgactggaaagcgggcagtgagcgcaacgcaattaatgtgagttagctcactcattaggcaccccaggctttacactttatgcttccggctcgtatgttgtgtggaattgtgagcggataacaatttcacacaggaaacagctatgaccatgattacgccaagcttgcatgcctgcaggtcgactctagaggatccccgggtaccgagctcgaattcactggccgtcgttttacaacgtcgtgactgggaaaaccctggcgttacccaacttaatcgccttgcagcacatccccctttcgccagctggcgtaatagcgaagaggcccgcaccgatcgcccttcccaacagttgcgcagcctgaatggcgaatggcgcctgatgcggtattttctccttacgcatctgtgcggtatttcacaccgcatatggtgcactctcagtacaatctgctctgatgccgcatagttaagccagccccgacacccgccaacacccgctgacgcgccctgacgggcttgtctgctcccggcatccgcttacagacaagctgtgacggtctcacgagaccaagtcacgaagtgtgcggccgccttcgtgcgcggaacccctatttgtttatttttctaaatacattcaaatatgtatccgctcatgagacaataaccctgataaatgcttcaataatattgaaaaaggaagagtatggctaaaatgagaatatcaccggaattgaaaaaactgatcgaaaaataccgctgcgtaaaagatacggaaggaatgtctcctgctaaggtatataagctggtgggagaaaatgaaaacctatatttaaaaatgacggacagccggtataaagggaccacctatgatgtggaacgggaaaaggacatgatgctatggctggaaggaaagctgcctgttccaaaggtcctgcactttgaacggcatgatggctggagcaatctgctcatgagtgaggccgatggcgtcctttgctcggaagagtatgaagatgaacaaagccctgaaaagattatcgagctgtatgcggagtgcatcaggctctttcactccatcgacatatcggattgtccctatacgaatagcttagacagccgcttagccgaattggattacttactgaataacgatctggccgatgtggattgcgaaaactgggaagaggacactccatttaaagatccgcgcgagctgtatgattttttaaagacggaaaagcccgaagaggaacttgtcttttcccacggcgacctgggagacagcaacatctttgtgaaagatggcaaagtaagtggctttattgatcttgggagaagcggcagggcggacaagtggtatgacattgccttctgcgtccggtcgctcagggaggatatcggggaagaacagtatgtcgagctattttttgacttactggggatcaagcctgattgggagaaaataaaatattatattttactggatgaattgttttaggagcctgtttaataagatgatcttcttgagatcgttttggtctgcgcgtaatctcttgctctgaaaacgaaaaaaccgccttgcagggcggtttttcgaaggttctctgagctaccaactctttgaaccgaggtaactggcttggaggagcgcagtcaccaaaacttgtcctttcagtttagccttaaccggcgcatgacttcaagactaactcctctaaatcaattaccagtggctgctgccagtggtgcttttgcatgtctttccgggttggactcaagacgatagttaccggataaggcgcagcggtcggactgaacggggggttcgtgcatacagtccagcttggagcgaactgcctacccggaactgagtgtcaggcgtggaatgagacaaacgcggccataacagcggaatgacaccggtaaaccgaaaggcaggaacaggagagcgcacgagggagccgccagggggaaacgcctggtatctttatagtcctgtcgggtttcgccaccactgatttgagcgtcagatttcgtgatgcttgtcaggggggcggagcctatggaaaaacggctttgccgcggccctctcacttccctgttaagtatcttcctggcatcttccaggaaatctccgccccgttcgtaagccatttccgctcgccgcagtcgaacgaccgagcgtagcgagtcagtgagcgaggaagcggaatatatcctgtatcacatattctgctgacgcaccggtgcagccttttttctcctgccacatgaagcacttcactgacaccctcatcagtgccaacatagtaagccagtatacactccgctagcgcgcaagcggccgca

SEQ ID NO: 30 - DNA, 3392 bp, Artificial Sequence
  source: /note="Description of Artificial Sequence: Synthetic polynucleotide"
cactctgtgacttggtctcctgagaccgtcagaccaagtttactcatatatactttagattgatttaaaacttcatttttaatttaaaaggatctaggtgaagatcctttttgataatctcatgaccaaaatcccttaacgtgagttttcgttccactgagcgtcagaccccgtagaaaagatcaaaggatcttcttgagatcctttttttctgcgcgtaatctgctgcttgcaaacaaaaaaaccaccgctaccagcggtggtttgtttgccggatcaagagctaccaactctttttccgaaggtaactggcttcagcagagcgcagataccaaatactgtccttctagtgtagccgtagttaggccaccacttcaagaactctgtagcaccgcctacatacctcgctctgctaatcctgttaccagtggctgctgccagtggcgataagtcgtgtcttaccgggttggactcaagacgatagttaccggataaggcgcagcggtcgggctgaacggggggttcgtgcacacagcccagcttggagcgaacgacctacaccgaactgagatacctacagcgtgagctatgagaaagcgccacgcttcccgaagggagaaaggcggacaggtatccggtaagcggcagggtcggaacaggagagcgcacgagggagcttccagggggaaacgcctggtatctttatagtcctgtcgggtttcgccacctctgacttgagcgtcgatttttgtgatgctcgtcaggggggcggagcctatggaaaaacgccagcaacgcggcctttttacggttcctggccttttgctggccttttgctcacatgttctttcctgcgttatcccctgattctgtggataaccgtattaccgcctttgagtgagctgataccgctcgccgcagccgaacgaccgagcgcagcgagtcagtgagcgaggaagcggatgagcgcccaatacgcaaaccgcctctccccgcgcgttggccgattcattaatgcagctggcacgacaggtttcccgactggaaagcgggcagtgagcgcaacgcaattaatgtgagttagctcactcattaggcaccccaggctttacactttatgcttccggctcgtatgttgtgtggaattgtgagcggataacaatttcacacaggaaacagctatgaccatgattacgccaagcttgcatgcctgcaggtcgactctagaggatccccgggtaccgagctcgaattcactggccgtcgttttacaacgtcgtgactgggaaaaccctggcgttacccaacttaatcgccttgcagcacatccccctttcgccagctggcgtaatagcgaagaggcccgcaccgatcgcccttcccaacagttgcgcagcctgaatggcgaatggcgcctgatgcggtattttctccttacgcatctgtgcggtatttcacaccgcatatggtgcactctcagtacaatctgctctgatgccgcatagttaagccagccccgacacccgccaacacccgctgacgcgccctgacgggcttgtctgctcccggcatccgcttacagacaagctgtgacggtctcacgagtgagaccaagtcacgaagtgtgcggccgccttcgtgcgcggaacccctatttgtttatttttctaaatacattcaaatatgtatccgctcatgagacaataaccctgataaatgcttcaataatattgaaaaaggaagagtatggctaaaatgagaatatcaccggaattgaaaaaactgatcgaaaaataccgctgcgtaaaagatacggaaggaatgtctcctgctaaggtatataagctggtgggagaaaatgaaaacctatatttaaaaatgacggacagccggtataaagggaccacctatgatgtggaacgggaaaaggacatgatgctatggctggaaggaaagctgcctgttccaaaggtcctgcactttgaacggcatgatggctggagcaatctgctcatgagtgaggccgatggcgtcctttgctcggaagagtatgaagatgaacaaagccctgaaaagattatcgagctgtatgcggagtgcatcaggctctttcactccatcgacatatcggattgtccctatacgaatagcttagacagccgcttagccgaattggattacttactgaataacgatctggccgatgtggattgcgaaaactgggaagaggacactccatttaaagatccgcgcgagctgtatgattttttaaagacggaaaagcccgaagaggaacttgtcttttcccacggcgacctgggagacagcaacatctttgtgaaagatggcaaagtaagtggctttattgatcttgggagaagcggcagggcggacaagtggtatgacattgccttctgcgtccggtcgctcagggaggatatcggggaagaacagtatgtcgagctattttttgacttactggggatcaagcctgattgggagaaaataaaatattatattttactggatgaattgttttaggagcctgtttaataagatgatcttcttgagatcgttttggtctgcgcgtaatctcttgctctgaaaacgaaaaaaccgccttgcagggcggtttttcgaaggttctctgagctaccaactctttgaaccgaggtaactggcttggaggagcgcagtcaccaaaacttgtcctttcagtttagccttaaccggcgcatgacttcaagactaactcctctaaatcaattaccagtggctgctgccagtggtgcttttgcatgtctttccgggttggactcaagacgatagttaccggataaggcgcagcggtcggactgaacggggggttcgtgcatacagtccagcttggagcgaactgcctacccggaactgagtgtcaggcgtggaatgagacaaacgcggccataacagcggaatgacaccggtaaaccgaaaggcaggaacaggagagcgcacgagggagccgccagggggaaacgcctggtatctttatagtcctgtcgggtttcgccaccactgatttgagcgtcagatttcgtgatgcttgtcaggggggcggagcctatggaaaaacggctttgccgcggccctctcacttccctgttaagtatcttcctggcatcttccaggaaatctccgccccgttcgtaagccatttccgctcgccgcagtcgaacgaccgagcgtagcgagtcagtgagcgaggaagcggaatatatcctgtatcacatattctgctgacgcaccggtgcagccttttttctcctgccacatgaagcacttcactgacaccctcatcagtgccaacatagtaagccagtatacactccgctagcgcgcaagcggccgca

SEQ ID NO: 31 - DNA, 3393 bp, Artificial Sequence
  source: /note="Description of Artificial Sequence: Synthetic polynucleotide"
cactctgtgaagctcttcatcctgaagagcggtcagaccaagtttactcatatatactttagattgatttaaaacttcatttttaatttaaaaggatctaggtgaagatcctttttgataatctcatgaccaaaatcccttaacgtgagttttcgttccactgagcgtcagaccccgtagaaaagatcaaaggatcttcttgagatcctttttttctgcgcgtaatctgctgcttgcaaacaaaaaaaccaccgctaccagcggtggtttgtttgccggatcaagagctaccaactctttttccgaaggtaactggcttcagcagagcgcagataccaaatactgtccttctagtgtagccgtagttaggccaccacttcaagaactctgtagcaccgcctacatacctcgctctgctaatcctgttaccagtggctgctgccagtggcgataagtcgtgtcttaccgggttggactcaagacgatagttaccggataaggcgcagcggtcgggctgaacggggggttcgtgcacacagcccagcttggagcgaacgacctacaccgaactgagatacctacagcgtgagctatgagaaagcgccacgcttcccgaagggagaaaggcggacaggtatccggtaagcggcagggtcggaacaggagagcgcacgagggagcttccagggggaaacgcctggtatctttatagtcctgtcgggtttcgccacctctgacttgagcgtcgatttttgtgatgctcgtcaggggggcggagcctatggaaaaacgccagcaacgcggcctttttacggttcctggccttttgctggccttttgctcacatgttctttcctgcgttatcccctgattctgtggataaccgtattaccgcctttgagtgagctgataccgctcgccgcagccgaacgaccgagcgcagcgagtcagtgagcgaggaagcggatgagcgcccaatacgcaaaccgcctctccccgcgcgttggccgattcattaatgcagctggcacgacaggtttcccgactggaaagcgggcagtgagcgcaacgcaattaatgtgagttagctcactcattaggcaccccaggctttacactttatgcttccggctcgtatgttgtgtggaattgtgagcggataacaatttcacacaggaaacagctatgaccatgattacgccaagcttgcatgcctgcaggtcgactctagaggatccccgggtaccgagctcgaattcactggccgtcgttttacaacgtcgtgactgggaaaaccctggcgttacccaacttaatcgccttgcagcacatccccctttcgccagctggcgtaatagcgaagaggcccgcaccgatcgcccttcccaacagttgcgcagcctgaatggcgaatggcgcctgatgcggtattttctccttacgcatctgtgcggtatttcacaccgcatatggtgcactctcagtacaatctgctctgatgccgcatagttaagccagccccgacacccgccaacacccgctgacgcgccctgacgggcttgtctgctcccggcatccgcttacagacaagctgtgaccgctcttcacgaagagcttcacgaagtgtgcggccgccttcgtgcgcggaacccctatttgtttatttttctaaatacattcaaatatgtatccgctcatgagacaataaccctgataaatgcttcaataatattgaaaaaggaagagtatggctaaaatgagaatatcaccggaattgaaaaaactgatcgaaaaataccgctgcgtaaaagatacggaaggaatgtctcctgctaaggtatataagctggtgggagaaaatgaaaacctatatttaaaaatgacggacagccggtataaagggaccacctatgatgtggaacgggaaaaggacatgatgctatggctggaaggaaagctgcctgttccaaaggtcctgcactttgaacggcatgatggctggagcaatctgctcatgagtgaggccgatggcgtcctttgctcggaagagtatgaagatgaacaaagccctgaaaagattatcgagctgtatgcggagtgcatcaggctctttcactccatcgacatatcggattgtccctatacgaatagcttagacagccgcttagccgaattggattacttactgaataacgatctggccgatgtggattgcgaaaactgggaagaggacactccatttaaagatccgcgcgagctgtatgattttttaaagacggaaaagcccgaagaggaacttgtcttttcccacggcgacctgggagacagcaacatctttgtgaaagatggcaaagtaagtggctttattgatcttgggagaagcggcagggcggacaagtggtatgacattgccttctgcgtccggtcgctcagggaggatatcggggaagaacagtatgtcgagctattttttgacttactggggatcaagcctgattgggagaaaataaaatattatattttactggatgaattgttttaggagcctgtttaataagatgatcttcttgagatcgttttggtctgcgcgtaatctcttgctctgaaaacgaaaaaaccgccttgcagggcggtttttcgaaggttctctgagctaccaactctttgaaccgaggtaactggcttggaggagcgcagtcaccaaaacttgtcctttcagtttagccttaaccggcgcatgacttcaagactaactcctctaaatcaattaccagtggctgctgccagtggtgcttttgcatgtctttccgggttggactcaagacgatagttaccggataaggcgcagcggtcggactgaacggggggttcgtgcatacagtccagcttggagcgaactgcctacccggaactgagtgtcaggcgtggaatgagacaaacgcggccataacagcggaatgacaccggtaaaccgaaaggcaggaacaggagagcgcacgagggagccgccagggggaaacgcctggtatctttatagtcctgtcgggtttcgccaccactgatttgagcgtcagatttcgtgatgcttgtcaggggggcggagcctatggaaaaacggctttgccgcggccctctcacttccctgttaagtatcttcctggcatcttccaggaaatctccgccccgttcgtaagccatttccgctcgccgcagtcgaacgaccgagcgtagcgagtcagtgagcgaggaagcggaatatatcctgtatcacatattctgctgacgcaccggtgcagccttttttctcctgccacatgaagcacttcactgacaccctcatcagtgccaacatagtaagccagtatacactccgctagcgcgcaagcggccgca

SEQ ID NO: 32 - DNA, 3390 bp, Artificial Sequence
  source: /note="Description of Artificial Sequence: Synthetic polynucleotide"
cactctgtgaagctcttcctgaagagcggtcagaccaagtttactcatatatactttagattgatttaaaacttcatttttaatttaaaaggatctaggtgaagatcctttttgataatctcatgaccaaaatcccttaacgtgagttttcgttccactgagcgtcagaccccgtagaaaagatcaaaggatcttcttgagatcctttttttctgcgcgtaatctgctgcttgcaaacaaaaaaaccaccgctaccagcggtggtttgtttgccggatcaagagctaccaactctttttccgaaggtaactggcttcagcagagcgcagataccaaatactgtccttctagtgtagccgtagttaggccaccacttcaagaactctgtagcaccgcctacatacctcgctctgctaatcctgttaccagtggctgctgccagtggcgataagtcgtgtcttaccgggttggactcaagacgatagttaccggataaggcgcagcggtcgggctgaacggggggttcgtgcacacagcccagcttggagcgaacgacctacaccgaactgagatacctacagcgtgagctatgagaaagcgccacgcttcccgaagggagaaaggcggacaggtatccggtaagcggcagggtcggaacaggagagcgcacgagggagcttccagggggaaacgcctggtatctttatagtcctgtcgggtttcgccacctctgacttgagcgtcgatttttgtgatgctcgtcaggggggcggagcctatggaaaaacgccagcaacgcggcctttttacggttcctggccttttgctggccttttgctcacatgttctttcctgcgttatcccctgattctgtggataaccgtattaccgcctttgagtgagctgataccgctcgccgcagccgaacgaccgagcgcagcgagtcagtgagcgaggaagcggatgagcgcccaatacgcaaaccgcctctccccgcgcgttggccgattcattaatgcagctggcacgacaggtttcccgactggaaagcgggcagtgagcgcaacgcaattaatgtgagttagctcactcattaggcaccccaggctttacactttatgcttccggctcgtatgttgtgtggaattgtgagcggataacaatttcacacaggaaacagctatgaccatgattacgccaagcttgcatgcctgcaggtcgactctagaggatccccgggtaccgagctcgaattcactggccgtcgttttacaacgtcgtgactgggaaaaccctggcgttacccaacttaatcgccttgcagcacatccccctttcgccagctggcgtaatagcgaagaggcccgcaccgatcgcccttcccaacagttgcgcagcctgaatggcgaatggcgcctgatgcggtattttctccttacgcatctgtgcggtatttcacaccgcatatggtgcactctcagtacaatctgctctgatgccgcatagttaagccagccccgacacccgccaacacccgctgacgcgccctgacgggcttgtctgctcccggcatccgcttacagacaagctgtgaccgctcttcacgaagagcttcacgaagtgtgcggccgccttcgtgcgcggaacccctatttgtttatttttctaaatacattcaaatatgtatccgctcatgagacaataaccctgataaatgcttcaataatattgaaaaaggaagagtatggctaaaatgagaatatcaccggaattgaaaaaactgatcgaaaaataccgctgcgtaaaagatacggaaggaatgtctcctgctaaggtatataagctggtgggagaaaatgaaaacctatatttaaaaatgacggacagccggtataaagggaccacctatgatgtggaacgggaaaaggacatgatgctatggctggaaggaaagctgcctgttccaaaggtcctgcactttgaacggcatgatggctggagcaatctgctcatgagtgaggccgatggcgtcctttgctcggaagagtatgaagatgaacaaagccctgaaaagattatcgagctgtatgcggagtgcatcaggctctttcactccatcgacatatcggattgtccctatacgaatagcttagacagccgcttagccgaattggattacttactgaataacgatctggccgatgtggattgcgaaaactgggaagaggacactccatttaaagatccgcgcgagctgtatgattttttaaagacggaaaagcccgaagaggaacttgtcttttcccacggcgacctgggagacagcaacatctttgtgaaagatggcaaagtaagtggctttattgatcttgggagaagcggcagggcggacaagtggtatgacattgccttctgcgtccggtcgctcagggaggatatcggggaagaacagtatgtcgagctattttttgacttactggggatcaagcctgattgggagaaaataaaatattatattttactggatgaattgttttaggagcctgtttaataagatgatcttcttgagatcgttttggtctgcgcgtaatctcttgctctgaaaacgaaaaaaccgccttgcagggcggtttttcgaaggttctctgagctaccaactctttgaaccgaggtaactggcttggaggagcgcagtcaccaaaacttgtcctttcagtttagccttaaccggcgcatgacttcaagactaactcctctaaatcaattaccagtggctgctgccagtggtgcttttgcatgtctttccgggttggactcaagacgatagttaccggataaggcgcagcggtcggactgaacggggggttcgtgcatacagtccagcttggagcgaactgcctacccggaactgagtgtcaggcgtggaatgagacaaacgcggccataacagcggaatgacaccggtaaaccgaaaggcaggaacaggagagcgcacgagggagccgccagggggaaacgcctggtatctttatagtcctgtcgggtttcgccaccactgatttgagcgtcagatttcgtgatgcttgtcaggggggcggagcctatggaaaaacggctttgccgcggccctctcacttccctgttaagtatcttcctggcatcttccaggaaatctccgccccgttcgtaagccatttccgctcgccgcagtcgaacgaccgagcgtagcgagtcagtgagcgaggaagcggaatatatcctgtatcacatattctgctgacgcaccggtgcagccttttttctcctgccacatgaagcacttcactgacaccctcatcagtgccaacatagtaagccagtatacactccgctagcgcgcaagcggccgca

SEQ ID NO: 33 - DNA, 3393 bp, Artificial Sequence
  source: /note="Description of Artificial Sequence: Synthetic polynucleotide"
cactctgtgaagctcttcctgaagagcggtcagaccaagtttactcatatatactttagattgatttaaaacttcatttttaatttaaaaggatctaggtgaagatcctttttgataatctcatgaccaaaatcccttaacgtgagttttcgttccactgagcgtcagaccccgtagaaaagatcaaaggatcttcttgagatcctttttttctgcgcgtaatctgctgcttgcaaacaaaaaaaccaccgctaccagcggtggtttgtttgccggatcaagagctaccaactctttttccgaaggtaactggcttcagcagagcgcagataccaaatactgtccttctagtgtagccgtagttaggccaccacttcaagaactctgtagcaccgcctacatacctcgctctgctaatcctgttaccagtggctgctgccagtggcgataagtcgtgtcttaccgggttggactcaagacgatagttaccggataaggcgcagcggtcgggctgaacggggggttcgtgcacacagcccagcttggagcgaacgacctacaccgaactgagatacctacagcgtgagctatgagaaagcgccacgcttcccgaagggagaaaggcggacaggtatccggtaagcggcagggtcggaacaggagagcgcacgagggagcttccagggggaaacgcctggtatctttatagtcctgtcgggtttcgccacctctgacttgagcgtcgatttttgtgatgctcgtcaggggggcggagcctatggaaaaacgccagcaacgcggcctttttacggttcctggccttttgctggccttttgctcacatgttctttcctgcgttatcccctgattctgtggataaccgtattaccgcctttgagtgagctgataccgctcgccgcagccgaacgaccgagcgcagcgagtcagtgagcgaggaagcggatgagcgcccaatacgcaaaccgcctctccccgcgcgttggccgattcattaatgcagctggcacgacaggtttcccgactggaaagcgggcagtgagcgcaacgcaattaatgtgagttagctcactcattaggcaccccaggctttacactttatgcttccggctcgtatgttgtgtggaattgtgagcggataacaatttcacacaggaaacagctatgaccatgattacgccaagcttgcatgcctgcaggtcgactctagaggatccccgggtaccgagctcgaattcactggccgtcgttttacaacgtcgtgactgggaaaaccctggcgttacccaacttaatcgccttgcagcacatccccctttcgccagctggcgtaatagcgaagaggcccgcaccgatcgcccttcccaacagttgcgcagcctgaatggcgaatggcgcctgatgcggtattttctccttacgcatctgtgcggtatttcacaccgcatatggtgcactctcagtacaatctgctctgatgccgcatagttaagccagccccgacacccgccaacacccgctgacgcgccctgacgggcttgtctgctcccggcatccgcttacagacaagctgtgaccgctcttcacgatgaagagcttcacgaagtgtgcggccgccttcgtgcgcggaacccctatttgtttatttttctaaatacattcaaatatgtatccgctcatgagacaataaccctgataaatgcttcaataatattgaaaaaggaagagtatggctaaaatgagaatatcaccggaattgaaaaaactgatcgaaaaataccgctgcgtaaaagatacggaaggaatgtctcctgctaaggtatataagctggtgggagaaaatgaaaacctatatttaaaaatgacggacagccggtataaagggaccacctatgatgtggaacgggaaaaggacatgatgctatggctggaaggaaagctgcctgttccaaaggtcctgcactttgaacggcatgatggctggagcaatctgctcatgagtgaggccgatggcgtcctttgctcggaagagtatgaagatgaacaaagccctgaaaagattatcgagctgtatgcggagtgcatcaggctctttcactccatcgacatatcggattgtccctatacgaatagcttagacagccgcttagccgaattggattacttactgaataacgatctggccgatgtggattgcgaaaactgggaagaggacactccatttaaagatccgcgcgagctgtatgattttttaaagacggaaaagcccgaagaggaacttgtcttttcccacggcgacctgggagacagcaacatctttgtgaaagatggcaaagtaagtggctttattgatcttgggagaagcggcagggcggacaagtggtatgacattgccttctgcgtccggtcgctcagggaggatatcggggaagaacagtatgtcgagctattttttgacttactggggatcaagcctgattgggagaaaataaaatattatattttactggatgaattgttttaggagcctgtttaataagatgatcttcttgagatcgttttggtctgcgcgtaatctcttgctctgaaaacgaaaaaaccgccttgcagggcggtttttcgaaggttctctgagctaccaactctttgaaccgaggtaactggcttggaggagcgcagtcaccaaaacttgtcctttcagtttagccttaaccggcgcatgacttcaagactaactcctctaaatcaattaccagtggctgctgccagtggtgcttttgcatgtctttccgggttggactcaagacgatagttaccggataaggcgcagcggtcggactgaacggggggttcgtgcatacagtccagcttggagcgaactgcctacccggaactgagtgtcaggcgtggaatgagacaaacgcggccataacagcggaatgacaccggtaaaccgaaaggcaggaacaggagagcgcacgagggagccgccagggggaaacgcctggtatctttatagtcctgtcgggtttcgccaccactgatttgagcgtcagatttcgtgatgcttgtcaggggggcggagcctatggaaaaacggctttgccgcggccctctcacttccctgttaagtatcttcctggcatcttccaggaaatctccgccccgttcgtaagccatttccgctcgccgcagtcgaacgaccgagcgtagcgagtcagtgagcgaggaagcggaatatatcctgtatcacatattctgctgacgcaccggtgcagccttttttctcctgccacatgaagcacttcactgacaccctcatcagtgccaacatagtaagccagtatacactccgctagcgcgcaagcggccgca

SEQ ID NO: 34 - DNA, 3610 bp, Artificial Sequence
  source: /note="Description of Artificial Sequence: Synthetic polynucleotide"
cactctgtgacttggtctcactcctgagaccgtcagaccaagtttactcatatatactttagattgatttaaaacttcatttttaatttaaaaggatctaggtgaagatcctttttgataatctcatgaccaaaatcccttaacgtgagttttcgttccactgagcgtcagaccccgtagaaaagatcaaaggatcttcttgagatcctttttttctgcgcgtaatctgctgcttgcaaacaaaaaaaccaccgctaccagcggtggtttgtttgccggatcaagagctaccaactctttttccgaaggtaactggcttcagcagagcgcagataccaaatactgtccttctagtgtagccgtagttaggccaccacttcaagaactctgtagcaccgcctacatacctcgctctgctaatcctgttaccagtggctgctgccagtggcgataagtcgtgtcttaccgggttggactcaagacgatagttaccggataaggcgcagcggtcgggctgaacggggggttcgtgcacacagcccagcttggagcgaacgacctacaccgaactgagatacctacagcgtgagctatgagaaagcgccacgcttcccgaagggagaaaggcggacaggtatccggtaagcggcagggtcggaacaggagagcgcacgagggagcttccagggggaaacgcctggtatctttatagtcctgtcgggtttcgccacctctgacttgagcgtcgatttttgtgatgctcgtcaggggggcggagcctatggaaaaacgccagcaacgcggcctttttacggttcctggccttttgctggccttttgctcacatgttctttcctgcgttatcccctgattctgtggataaccgtattaccgcctttgagtgagctgataccgctcgccgcagccgaacgaccgagcgcagcgagtcagtgagcgaggaagcggatgagcgcccaatacgcaaaccgcctctccccgcgcgttggccgattcattaatgcagctggcacgacaggtttcccgactggaaagcgggcagtgagcgcaacgcaattaatgtgagttagctcactcattaggcaccccaggctttacactttatgcttccggctcgtatgttgtgtggaattgtgagcggataacaatttcacacaggaaacagctatgaccatgattacgccaagcttgcatgcctgcaggtcgactctagaggatccccgggtaccgagctcgaattcactggccgtcgttttacaacgtcgtgactgggaaaaccctggcgttacccaacttaatcgccttgcagcacatccccctttcgccagctggcgtaatagcgaagaggcccgcaccgatcgcccttcccaacagttgcgcagcctgaatggcgaatggcgcctgatgcggtattttctccttacgcatctgtgcggtatttcacaccgcatatggtgcactctcagtacaatctgctctgatgccgcatagttaagccagccccgacacccgccaacacccgctgacgcgccctgacgggcttgtctgctcccggcatccgcttacagacaagctgtgacggtctcacgagaccaagtcacgaagtgtgcggccgccttcgtgcgcggaacccctatttgtttatttttctaaatacattcaaatatgtatccgctcatgagacaataaccctgataaatgcttcaataatattgaaaaaggaagagtatgcgctcacgcaactggtccagaaccttgaccgaacgcagcggtggtaacggcgcagtggcggttttcatggcttgttatgactgtttttttttggggtacagtctatgcctcgggcatccaagcagcaagcgcgttacgccgtgggtcgatgtttgatgttatggagcagcaacgatgttacgcagcagggcagtcgccctaaaacaaagttaaacatcatgagggaagcggtgatcgccgaagtatcgactcaactatcagaggtagttggcgtcatcgagcgccatctcgaaccgacgttgctggccgtacatttgtacggctccgcagtggatggcggcctgaagccacacagcgatattgatttgctggttacggtgaccgtaaggcttgatgaaacaacgcggcgagctttgatcaacgaccttttggaaacttcggcttcccctggagagagcgagattctccgcgctgtagaagtcaccattgttgtgcacgacgacatcattccgtggcgttatccagctaagcgcgaactgcaatttggagaatggcagcgcaatgacattcttgcaggtatcttcgagccagccacgatcgacattgatctggctatcttgctgacaaaagcaagagaacatagcgttgccttggtaggtccagcggcggaggaactctttgatccggttcctgaacaggatctatttgaggcgctaaatgaaaccttaacgctatggaactcgccgcccgactgggctggcgatgagcgaaatgtagtgcttacgttgtcccgcatttggtacagcgcagtaaccggcaaaatcgcgccgaaggatgtcgctgccgactgggcaatggagcgcctgccggcccagtatcagcccgtcatacttgaagctagacaggcttatcttggacaagaagaagatcgcttggcctcgcgcgcagatcagttggaagaatttgtccattacgtaaaaggcgagatcaccaaggtagtcggcaaataagagcctgtttaataagatgatcttcttgagatcgttttggtctgcgcgtaatctcttgctctgaaaacgaaaaaaccgccttgcagggcggtttttcgaaggttctctgagctaccaactctttgaaccgaggtaactggcttggaggagcgcagtcaccaaaacttgtcctttcagtttagccttaaccggcgcatgacttcaagactaactcctctaaatcaattaccagtggctgctgccagtggtgcttttgcatgtctttccgggttggactcaagacgatagttaccggataaggcgcagcggtcggactgaacggggggttcgtgcatacagtccagcttggagcgaactgcctacccggaactgagtgtcaggcgtggaatgagacaaacgcggccataacagcggaatgacaccggtaaaccgaaaggcaggaacaggagagcgcacgagggagccgccagggggaaacgcctggtatctttatagtcctgtcgggtttcgccaccactgatttgagcgtcagatttcgtgatgcttgtcaggggggcggagcctatggaaaaacggctttgccgcggccctctcacttccctgttaagtatcttcctggcatcttccaggaaatctccgccccgttcgtaagccatttccgctcgccgcagtcgaacgaccgagcgtagcgagtcagtgagcgaggaagcggaatatatcctgtatcacatattctgctgacgcaccggtgcagccttttttctcctgccacatgaagcacttcactgacaccctcatcagtgccaacatagtaagccagtatacactccgctagcgcgcaagcggccgca

SEQ ID NO: 35 - DNA, 3606 bp, Artificial Sequence
  source: /note="Description of Artificial Sequence: Synthetic polynucleotide"
cactctgtgacttggtctcctgagaccgtcagaccaagtttactcatatatactttagattgatttaaaacttcatttttaatttaaaaggatctaggtgaagatcctttttgataatctcatgaccaaaatcccttaacgtgagttttcgttccactgagcgtcagaccccgtagaaaagatcaaaggatcttcttgagatcctttttttctgcgcgtaatctgctgcttgcaaacaaaaaaaccaccgctaccagcggtggtttgtttgccggatcaagagctaccaactctttttccgaaggtaactggcttcagcagagcgcagataccaaatactgtccttctagtgtagccgtagttaggccaccacttcaagaactctgtagcaccgcctacatacctcgctctgctaatcctgttaccagtggctgctgccagtggcgataagtcgtgtcttaccgggttggactcaagacgatagttaccggataaggcgcagcggtcgggctgaacggggggttcgtgcacacagcccagcttggagcgaacgacctacaccgaactgagatacctacagcgtgagctatgagaaagcgccacgcttcccgaagggagaaaggcggacaggtatccggtaagcggcagggtcggaacaggagagcgcacgagggagcttccagggggaaacgcctggtatctttatagtcctgtcgggtttcgccacctctgacttgagcgtcgatttttgtgatgctcgtcaggggggcggagcctatggaaaaacgccagcaacgcggcctttttacggttcctggccttttgctggccttttgctcacatgttctttcctgcgttatcccctgattctgtggataaccgtattaccgcctttgagtgagctgataccgctcgccgcagccgaacgaccgagcgcagcgagtcagtgagcgaggaagcggatgagcgcccaatacgcaaaccgcctctccccgcgcgttggccgattcattaatgcagctggcacgacaggtttcccgactggaaagcgggcagtgagcgcaacgcaattaatgtgagttagctcactcattaggcaccccaggctttacactttatgcttccggctcgtatgttgtgtggaattgtgagcggataacaatttcacacaggaaacagctatgaccatgattacgccaagcttgcatgcctgcaggtcgactctagaggatccccgggtaccgagctcgaattcactggccgtcgttttacaacgtcgtgactgggaaaaccctggcgttacccaacttaatcgccttgcagcacatccccctttcgccagctggcgtaatagcgaagaggcccgcaccgatcgcccttcccaacagttgcgcagcctgaatggcgaatggcgcctgatgcggtattttctccttacgcatctgtgcggtatttcacaccgcatatggtgcactctcagtacaatctgctctgatgccgcatagttaagccagccccgacacccgccaacacccgctgacgcgccctgacgggcttgtctgctcccggcatccgcttacagacaagctgtgacggtctcacgagaccaagtcacgaagtgtgcggccgccttcgtgcgcggaacccctatttgtttatttttctaaatacattcaaatatgtatccgctcatgagacaataaccctgataaatgcttcaataatattgaaaaaggaagagtatgcgctcacgcaactggtccagaaccttgaccgaacgcagcggtggtaacggcgcagtggcggttttcatggcttgttatgactgtttttttttggggtacagtctatgcctcgggcatccaagcagcaagcgcgttacgccgtgggtcgatgtttgatgttatggagcagcaacgatgttacgcagcagggcagtcgccctaaaacaaagttaaacatcatgagggaagcggtgatcgccgaagtatcgactcaactatcagaggtagttggcgtcatcgagcgccatctcgaaccgacgttgctggccgtacatttgtacggctccgcagtggatggcggcctgaagccacacagcgatattgatttgctggttacggtgaccgtaaggcttgatgaaacaacgcggcgagctttgatcaacgaccttttggaaacttcggcttcccctggagagagcgagattctccgcgctgtagaagtcaccattgttgtgcacgacgacatcattccgtggcgttatccagctaagcgcgaactgcaatttggagaatggcagcgcaatgacattcttgcaggtatcttcgagccagccacgatcgacattgatctggctatcttgctgacaaaagcaagagaacatagcgttgccttggtaggtccagcggcggaggaactctttgatccggttcctgaacaggatctatttgaggcgctaaatgaaaccttaacgctatggaactcgccgcccgactgggctggcgatgagcgaaatgtagtgcttacgttgtcccgcatttggtacagcgcagtaaccggcaaaatcgcgccgaaggatgtcgctgccgactgggcaatggagcgcctgccggcccagtatcagcccgtcatacttgaagctagacaggcttatcttggacaagaagaagatcgcttggcctcgcgcgcagatcagttggaagaatttgtccattacgtaaaaggcgagatcaccaaggtagtcggcaaataagagcctgtttaataagatgatcttcttgagatcgttttggtctgcgcgtaatctcttgctctgaaaacgaaaaaaccgccttgcagggcggtttttcgaaggttctctgagctaccaactctttgaaccgaggtaactggcttggaggagcgcagtcaccaaaacttgtcctttcagtttagccttaaccggcgcatgacttcaagactaactcctctaaatcaattaccagtggctgctgccagtggtgcttttgcatgtctttccgggttggactcaagacgatagttaccggataaggcgcagcggtcggactgaacggggggttcgtgcatacagtccagcttggagcgaactgcctacccggaactgagtgtcaggcgtggaatgagacaaacgcggccataacagcggaatgacaccggtaaaccgaaaggcaggaacaggagagcgcacgagggagccgccagggggaaacgcctggtatctttatagtcctgtcgggtttcgccaccactgatttgagcgtcagatttcgtgatgcttgtcaggggggcggagcctatggaaaaacggctttgccgcggccctctcacttccctgttaagtatcttcctggcatcttccaggaaatctccgccccgttcgtaagccatttccgctcgccgcagtcgaacgaccgagcgtagcgagtcagtgagcgaggaagcggaatatatcctgtatcacatattctgctgacgcaccggtgcagccttttttctcctgccacatgaagcacttcactgacaccctcatcagtgccaacatagtaagccagtatacactccgctagcgcgcaagcggccgca

SEQ ID NO: 36 - DNA, 3610 bp, Artificial Sequence
  source: /note="Description of Artificial Sequence: Synthetic polynucleotide"
cactctgtgacttggtctcctgagaccgtcagaccaagtttactcatatatactttagattgatttaaaacttcatttttaatttaaaaggatctaggtgaagatcctttttgataatctcatgaccaaaatcccttaacgtgagttttcgttccactgagcgtcagaccccgtagaaaagatcaaaggatcttcttgagatcctttttttctgcgcgtaatctgctgcttgcaaacaaaaaaaccaccgctaccagcggtggtttgtttgccggatcaagagctaccaactctttttccgaaggtaactggcttcagcagagcgcagataccaaatactgtccttctagtgtagccgtagttaggccaccacttcaagaactctgtagcaccgcctacatacctcgctctgctaatcctgttaccagtggctgctgccagtggcgataagtcgtgtcttaccgggttggactcaagacgatagttaccggataaggcgcagcggtcgggctgaacggggggttcgtgcacacagcccagcttggagcgaacgacctacaccgaactgagatacctacagcgtgagctatgagaaagcgccacgcttcccgaagggagaaaggcggacaggtatccggtaagcggcagggtcggaacaggagagcgcacgagggagcttccagggggaaacgcctggtatctttatagtcctgtcgggtttcgccacctctgacttgagcgtcgatttttgtgatgctcgtcaggggggcggagcctatggaaaaacgccagcaacgcggcctttttacggttcctggccttttgctggccttttgctcacatgttctttcctgcgttatcccctgattctgtggataaccgtattaccgcctttgagtgagctgataccgctcgccgcagccgaacgaccgagcgcagcgagtcagtgagcgaggaagcggatgagcgcccaatacgcaaaccgcctctccccgcgcgttggccgattcattaatgcagctggcacgacaggtttcccgactggaaagcgggcagtgagcgcaacgcaattaatgtgagttagctcactcattaggcaccccaggctttacactttatgcttccggctcgtatgttgtgtggaattgtgagcggataacaatttcacacaggaaacagctatgaccatgattacgccaagcttgcatgcctgcaggtcgactctagaggatccccgggtaccgagctcgaattcactggccgtcgttttacaacgtcgtgactgggaaaaccctggcgttacccaacttaatcgccttgcagcacatccccctttcgccagctggcgtaatagcgaagaggcccgcaccgatcgcccttcccaacagttgcgcagcctgaatggcgaatggcgcctgatgcggtattttctccttacgcatctgtgcggtatttcacaccgcatatggtgcactctcagtacaatctgctctgatgccgcatagttaagccagccccgacacccgccaacacccgctgacgcgccctgacgggcttgtctgctcccggcatccgcttacagacaagctgtgacggtctcacgagtgagaccaagtcacgaagtgtgcggccgccttcgtgcgcggaacccctatttgtttatttttctaaatacattcaaatatgtatccgctcatgagacaataaccctgataaatgcttcaataatattgaaaaaggaagagtatgcgctcacgcaactggtccagaaccttgaccgaacgcagcggtggtaacggcgcagtggcggttttcatggcttgttatgactgtttttttttggggtacagtctatgcctcgggcatccaagcagcaagcgcgttacgccgtgggtcgatgtttgatgttatggagcagcaacgatgttacgcagcagggcagtcgccctaaaacaaagttaaacatcatgagggaagcggtgatcgccgaagtatcgactcaactatcagaggtagttggcgtcatcgagcgccatctcgaaccgacgttgctggccgtacatttgtacggctccgcagtggatggcggcctgaagccacacagcgatattgatttgctggttacggtgaccgtaaggcttgatgaaacaacgcggcgagctttgatcaacgaccttttggaaacttcggcttcccctggagagagcgagattctccgcgctgtagaagtcaccattgttgtgcacgacgacatcattccgtggcgttatccagctaagcgcgaactgcaatttggagaatggcagcgcaatgacattcttgcaggtatcttcgagccagccacgatcgacattgatctggctatcttgctgacaaaagcaagagaacatagcgttgccttggtaggtccagcggcggaggaactctttgatccggttcctgaacaggatctatttgaggcgctaaatgaaaccttaacgctatggaactcgccgcccgactgggctggcgatgagcgaaatgtagtgcttacgttgtcccgcatttggtacagcgcagtaaccggcaaaatcgcgccgaaggatgtcgctgccgactgggcaatggagcgcctgccggcccagtatcagcccgtcatacttgaagctagacaggcttatcttggacaagaagaagatcgcttggcctcgcgcgcagatcagttggaagaatttgtccattacgtaaaaggcgagatcaccaaggtagtcggcaaataagagcctgtttaataagatgatcttcttgagatcgttttggtctgcgcgtaatctcttgctctgaaaacgaaaaaaccgccttgcagggcggtttttcgaaggttctctgagctaccaactctttgaaccgaggtaactggcttggaggagcgcagtcaccaaaacttgtcctttcagtttagccttaaccggcgcatgacttcaagactaactcctctaaatcaattaccagtggctgctgccagtggtgcttttgcatgtctttccgggttggactcaagacgatagttaccggataaggcgcagcggtcggactgaacggggggttcgtgcatacagtccagcttggagcgaactgcctacccggaactgagtgtcaggcgtggaatgagacaaacgcggccataacagcggaatgacaccggtaaaccgaaaggcaggaacaggagagcgcacgagggagccgccagggggaaacgcctggtatctttatagtcctgtcgggtttcgccaccactgatttgagcgtcagatttcgtgatgcttgtcaggggggcggagcctatggaaaaacggctttgccgcggccctctcacttccctgttaagtatcttcctggcatcttccaggaaatctccgccccgttcgtaagccatttccgctcgccgcagtcgaacgaccgagcgtagcgagtcagtgagcgaggaagcggaatatatcctgtatcacatattctgctgacgcaccggtgcagccttttttctcctgccacatgaagcacttcactgacaccctcatcagtgccaacatagtaagccagtatacactccgctagcgcgcaagcggccgca

SEQ ID NO: 37 - DNA, 3611 bp, Artificial Sequence
  source: /note="Description of Artificial Sequence: Synthetic polynucleotide"
cactctgtgaagctcttcatcctgaagagcggtcagaccaagtttactcatatatactttagattgatttaaaacttcatttttaatttaaaaggatctaggtgaagatcctttttgataatctcatgaccaaaatcccttaacgtgagttttcgttccactgagcgtcagaccccgtagaaaagatcaaaggatcttcttgagatcctttttttctgcgcgtaatctgctgcttgcaaacaaaaaaaccaccgctaccagcggtggtttgtttgccggatcaagagctaccaactctttttccgaaggtaactggcttcagcagagcgcagataccaaatactgtccttctagtgtagccgtagttaggccaccacttcaagaactctgtagcaccgcctacatacctcgctctgctaatcctgttaccagtggctgctgccagtggcgataagtcgtgtcttaccgggttggactcaagacgatagttaccggataaggcgcagcggtcgggctgaacggggggttcgtgcacacagcccagcttggagcgaacgacctacaccgaactgagatacctacagcgtgagctatgagaaagcgccacgcttcccgaagggagaaaggcggacaggtatccggtaagcggcagggtcggaacaggagagcgcacgagggagcttccagggggaaacgcctggtatctttatagtcctgtcgggtttcgccacctctgacttgagcgtcgatttttgtgatgctcgtcaggggggcggagcctatggaaaaacgccagcaacgcggcctttttacggttcctggccttttgctggccttttgctcacatgttctttcctgcgttatcccctgattctgtggataaccgtattaccgcctttgagtgagctgataccgctcgccgcagccgaacgaccgagcgcagcgagtcagtgagcgaggaagcggatgagcgcccaatacgcaaaccgcctctccccgcgcgttggccgattcattaatgcagctggcacgacaggtttcccgactggaaagcgggcagtgagcgcaacgcaattaatgtgagttagctcactcattaggcaccccaggctttacactttatgcttccggctcgtatgttgtgtggaattgtgagcggataacaatttcacacaggaaacagctatgaccatgattacgccaagcttgcatgcctgcaggtcgactctagaggatccccgggtaccgagctcgaattcactggccgtcgttttacaacgtcgtgactgggaaaaccctggcgttacccaacttaatcgccttgcagcacatccccctttcgccagctggcgtaatagcgaagaggcccgcaccgatcgcccttcccaacagttgcgcagcctgaatggcgaatggcgcctgatgcggtattttctccttacgcatctgtgcggtatttcacaccgcatatggtgcactctcagtacaatctgctctgatgccgcatagttaagccagccccgacacccgccaacacccgctgacgcgccctgacgggcttgtctgctcccggcatccgcttacagacaagctgtgaccgctcttcacgaagagcttcacgaagtgtgcggccgccttcgtgcgcggaacccctatttgtttatttttctaaatacattcaaatatgtatccgctcatgagacaataaccctgataaatgcttcaataatattgaaaaaggaagagtatgcgctcacgcaactggtccagaaccttgaccgaacgcagcggtggtaacggcgcagtggcggttttcatggcttgttatgactgtttttttttggggtacagtctatgcctcgggcatccaagcagcaagcgcgttacgccgtgggtcgatgtttgatgttatggagcagcaacgatgttacgcagcagggcagtcgccctaaaacaaagttaaacatcatgagggaagcggtgatcgccgaagtatcgactcaactatcagaggtagttggcgtcatcgagcgccatctcgaaccgacgttgctggccgtacatttgtacggctccgcagtggatggcggcctgaagccacacagcgatattgatttgctggttacggtgaccgtaaggcttgatgaaacaacgcggcgagctttgatcaacgaccttttggaaacttcggcttcccctggagagagcgagattctccgcgctgtagaagtcaccattgttgtgcacgacgacatcattccgtggcgttatccagctaagcgcgaactgcaatttggagaatggcagcgcaatgacattcttgcaggtatcttcgagccagccacgatcgacattgatctggctatcttgctgacaaaagcaagagaacatagcgttgccttggtaggtccagcggcggaggaactctttgatccggttcctgaacaggatctatttgaggcgctaaatgaaaccttaacgctatggaactcgccgcccgactgggctggcgatgagcgaaatgtagtgcttacgttgtcccgcatttggtacagcgcagtaaccggcaaaatcgcgccgaaggatgtcgctgccgactgggcaatggagcgcctgccggcccagtatcagcccgtcatacttgaagctagacaggcttatcttggacaagaagaagatcgcttggcctcgcgcgcagatcagttggaagaatttgtccattacgtaaaaggcgagatcaccaaggtagtcggcaaataagagcctgtttaataagatgatcttcttgagatcgttttggtctgcgcgtaatctcttgctctgaaaacgaaaaaaccgccttgcagggcggtttttcgaaggttctctgagctaccaactctttgaaccgaggtaactggcttggaggagcgcagtcaccaaaacttgtcctttcagtttagccttaaccggcgcatgacttcaagactaactcctctaaatcaattaccagtggctgctgccagtggtgcttttgcatgtctttccgggttggactcaagacgatagttaccggataaggcgcagcggtcggactgaacggggggttcgtgcatacagtccagcttggagcgaactgcctacccggaactgagtgtcaggcgtggaatgagacaaacgcggccataacagcggaatgacaccggtaaaccgaaaggcaggaacaggagagcgcacgagggagccgccagggggaaacgcctggtatctttatagtcctgtcgggtttcgccaccactgatttgagcgtcagatttcgtgatgcttgtcaggggggcggagcctatggaaaaacggctttgccgcggccctctcacttccctgttaagtatcttcctggcatcttccaggaaatctccgccccgttcgtaagccatttccgctcgccgcagtcgaacgaccgagcgtagcgagtcagtgagcgaggaagcggaatatatcctgtatcacatattctgctgacgcaccggtgcagccttttttctcctgccacatgaagcacttcactgacaccctcatcagtgccaacatagtaagccagtatacactccgctagcgcgcaagcggccgca

SEQ ID NO: 38 - DNA, 3608 bp, Artificial Sequence
  source: /note="Description of Artificial Sequence: Synthetic polynucleotide"
cactctgtgaagctcttcctgaagagcggtcagaccaagtttactcatatatactttagattgatttaaaacttcatttttaatttaaaaggatctaggtgaagatcctttttgataatctcatgaccaaaatcccttaacgtgagttttcgttccactgagcgtcagaccccgtagaaaagatcaaaggatcttcttgagatcctttttttctgcgcgtaatctgctgcttgcaaacaaaaaaaccaccgctaccagcggtggtttgtttgccggatcaagagctaccaactctttttccgaaggtaactggcttcagcagagcgcagataccaaatactgtccttctagtgtagccgtagttaggccaccacttcaagaactctgtagcaccgcctacatacctcgctctgctaatcctgttaccagtggctgctgccagtggcgataagtcgtgtcttaccgggttggactcaagacgatagttaccggataaggcgcagcggtcgggctgaacggggggttcgtgcacacagcccagcttggagcgaacgacctacaccgaactgagatacctacagcgtgagctatgagaaagcgccacgcttcccgaagggagaaaggcggacaggtatccggtaagcggcagggtcggaacaggagagcgcacgagggagcttccagggggaaacgcctggtatctttatagtcctgtcgggtttcgccacctctgacttgagcgtcgatttttgtgatgctcgtcaggggggcggagcctatggaaaaacgccagcaacgcggcctttttacggttcctggccttttgctggccttttgctcacatgttctttcctgcgttatcccctgattctgtggataaccgtattaccgcctttgagtgagctgataccgctcgccgcagccgaacgaccgagcgcagcgagtcagtgagcgaggaagcggatgagcgcccaatacgcaaaccgcctctccccgcgcgttggccgattcattaatgcagctggcacgacaggtttcccgactggaaagcgggcagtgagcgcaacgcaattaatgtgagttagctcactcattaggcaccccaggctttacactttatgcttccggctcgtatgttgtgtggaattgtgagcggataacaatttcacacaggaaacagctatgaccatgattacgccaagcttgcatgcctgcaggtcgactctagaggatccccgggtaccgagctcgaattcactggccgtcgttttacaacgtcgtgactgggaaaaccctggcgttacccaacttaatcgccttgcagcacatccccctttcgccagctggcgtaatagcgaagaggcccgcaccgatcgcccttcccaacagttgcgcagcctgaatggcgaatggcgcctgatgcggtattttctccttacgcatctgtgcggtatttcacaccgcatatggtgcactctcagtacaatctgctctgatgccgcatagttaagccagccccgacacccgccaacacccgctgacgcgccctgacgggcttgtctgctcccggcatccgcttacagacaagctgtgaccgctcttcacgaagagcttcacgaagtgtgcggccgccttcgtgcgcggaacccctatttgtttatttttctaaatacattcaaatatgtatccgctcatgagacaataaccctgataaatgcttcaataatattgaaaaaggaagagtatgcgctcacgcaactggtccagaaccttgaccgaacgcagcggtggtaacggcgcagtggcggttttcatggcttgttatgactgtttttttttggggtacagtctatgcctcgggcatccaagcagcaagcgcgttacgccgtgggtcgatgtttgatgttatggagcagcaacgatgttacgcagcagggcagtcgccctaaaacaaagttaaacatcatgagggaagcggtgatcgccgaagtatcgactcaactatcagaggtagttggcgtcatcgagcgccatctcgaaccgacgttgctggccgtacatttgtacggctccgcagtggatggcggcctgaagccacacagcgatattgatttgctggttacggtgaccgtaaggcttgatgaaacaacgcggcgagctttgatcaacgaccttttggaaacttcggcttcccctggagagagcgagattctccgcgctgtagaagtcaccattgttgtgcacgacgacatcattccgtggcgttatccagctaagcgcgaactgcaatttggagaatggcagcgcaatgacattcttgcaggtatcttcgagccagccacgatcgacattgatctggctatcttgctgacaaaagcaagagaacatagcgttgccttggtaggtccagcggcggaggaactctttgatccggttcctgaacaggatctatttgaggcgctaaatgaaaccttaacgctatggaactcgccgcccgactgggctggcgatgagcgaaatgtagtgcttacgttgtcccgcatttggtacagcgcagtaaccggcaaaatcgcgccgaaggatgtcgctgccgactgggcaatggagcgcctgccggcccagtatcagcccgtcatacttgaagctagacaggcttatcttggacaagaagaagatcgcttggcctcgcgcgcagatcagttggaagaatttgtccattacgtaaaaggcgagatcaccaaggtagtcggcaaataagagcctgtttaataagatgatcttcttgagatcgttttggtctgcgcgtaatctcttgctctgaaaacgaaaaaaccgccttgcagggcggtttttcgaaggttctctgagctaccaactctttgaaccgaggtaactggcttggaggagcgcagtcaccaaaacttgtcctttcagtttagccttaaccggcgcatgacttcaagactaactcctctaaatcaattaccagtggctgctgccagtggtgcttttgcatgtctttccgggttggactcaagacgatagttaccggataaggcgcagcggtcggactgaacggggggttcgtgcatacagtccagcttggagcgaactgcctacccggaactgagtgtcaggcgtggaatgagacaaacgcggccataacagcggaatgacaccggtaaaccgaaaggcaggaacaggagagcgcacgagggagccgccagggggaaacgcctggtatctttatagtcctgtcgggtttcgccaccactgatttgagcgtcagatttcgtgatgcttgtcaggggggcggagcctatggaaaaacggctttgccgcggccctctcacttccctgttaagtatcttcctggcatcttccaggaaatctccgccccgttcgtaagccatttccgctcgccgcagtcgaacgaccgagcgtagcgagtcagtgagcgaggaagcggaatatatcctgtatcacatattctgctgacgcaccggtgcagccttttttctcctgccacatgaagcacttcactgacaccctcatcagtgccaacatagtaagccagtatacactccgctagcgcgcaagcggccgca

SEQ ID NO: 39 - DNA, 3611 bp, Artificial Sequence
  source: /note="Description of Artificial Sequence: Synthetic polynucleotide"
cactctgtgaagctcttcctgaagagcggtcagaccaagtttactcatatatactttagattgatttaaaacttcatttttaatttaaaaggatctaggtgaagatcctttttgataatctcatgaccaaaatcccttaacgtgagttttcgttccactgagcgtcagaccccgtagaaaagatcaaaggatcttcttgagatcctttttttctgcgcgtaatctgctgcttgcaaacaaaaaaaccaccgctaccagcggtggtttgtttgccggatcaagagctaccaactctttttccgaaggtaactggcttcagcagagcgcagataccaaatactgtccttctagtgtagccgtagttaggccaccacttcaagaactctgtagcaccgcctacatacctcgctctgctaatcctgttaccagtggctgctgccagtggcgataagtcgtgtcttaccgggttggactcaagacgatagttaccggataaggcgcagcggtcgggctgaacggggggttcgtgcacacagcccagcttggagcgaacgacctacaccgaactgagatacctacagcgtgagctatgagaaagcgccacgcttcccgaagggagaaaggcggacaggtatccggtaagcggcagggtcggaacaggagagcgcacgagggagcttccagggggaaacgcctggtatctttatagtcctgtcgggtttcgccacctctgacttgagcgtcgatttttgtgatgctcgtcaggggggcggagcctatggaaaaacgccagcaacgcggcctttttacggttcctggccttttgctggccttttgctcacatgttctttcctgcgttatcccctgattctgtggataaccgtattaccgcctttgagtgagctgataccgctcgccgcagccgaacgaccgagcgcagcgagtcagtgagcgaggaagcggatgagcgcccaatacgcaaaccgcctctccccgcgcgttggccgattcattaatgcagctggcacgacaggtttcccgactggaaagcgggcagtgagcgcaacgcaattaatgtgagttagctcactcattaggcaccccaggctttacactttatgcttccggctcgtatgttgtgtggaattgtgagcggataacaatttcacacaggaaacagctatgaccatgattacgccaagcttgcatgcctgcaggtcgactctagaggatccccgggtaccgagctcgaattcactggccgtcgttttacaacgtcgtgactgggaaaaccctggcgttacccaacttaatcgccttgcagcacatccccctttcgccagctggcgtaatagcgaagaggcccgcaccgatcgcccttcccaacagttgcgcagcctgaatggcgaatggcgcctgatgcggtattttctccttacgcatctgtgcggtatttcacaccgcatatggtgcactctcagtacaatctgctctgatgccgcatagttaagccagccccgacacccgccaacacccgctgacgcgccctgacgggcttgtctgctcccggcatccgcttacagacaagctgtgaccgctcttcacgatgaagagcttcacgaagtgtgcggccgccttcgtgcgcggaacccctatttgtttatttttctaaatacattcaaatatgtatccgctcatgagacaataaccctgataaatgcttcaataatattgaaaaaggaagagtatgcgctcacgcaactggtccagaaccttgaccgaacgcagcggtggtaacggcgcagtggcggttttcatggcttgttatgactgtttttttttggggtacagtctatgcctcgggcatccaagcagcaagcgcgttacgccgtgggtcgatgtttgatgttatggagcagcaacgatgttacgcagcagggcagtcgccctaaaacaaagttaaacatcatgagggaagcggtgatcgccgaagtatcgactcaactatcagaggtagttggcgtcatcgagcgccatctcgaaccgacgttgctggccgtacatttgtacggctccgcagtggatggcggcctgaagccacacagcgatattgatttgctggttacggtgaccgtaaggcttgatgaaacaacgcggcgagctttgatcaacgaccttttggaaacttcggcttcccctggagagagcgagattctccgcgctgtagaagtcaccattgttgtgcacgacgacatcattccgtggcgttatccagctaagcgcgaactgcaatttggagaatggcagcgcaatgacattcttgcaggtatcttcgagccagccacgatcgacattgatctggctatcttgctgacaaaagcaagagaacatagcgttgccttggtaggtccagcggcggaggaactctttgatccggttcctgaacaggatctatttgaggcgctaaatgaaaccttaacgctatggaactcgccgcccgactgggctggcgatgagcgaaatgtagtgcttacgttgtcccgcatttggtacagcgcagtaaccggcaaaatcgcgccgaaggatgtcgctgccgactgggcaatggagcgcctgccggcccagtatcagcccgtcatacttgaagctagacaggcttatcttggacaagaagaagatcgcttggcctcgcgcgcagatcagttggaagaatttgtccattacgtaaaaggcgagatcaccaaggtagtcggcaaataagagcctgtttaataagatgatcttcttgagatcgttttggtctgcgcgtaatctcttgctctgaaaacgaaaaaaccgccttgcagggcggtttttcgaaggttctctgagctaccaactctttgaaccgaggtaactggcttggaggagcgcagtcaccaaaacttgtcctttcagtttagccttaaccggcgcatgacttcaagactaactcctctaaatcaattaccagtggctgctgccagtggtgcttttgcatgtctttccgggttggactcaagacgatagttaccggataaggcgcagcggtcggactgaacggggggttcgtgcatacagtccagcttggagcgaactgcctacccggaactgagtgtcaggcgtggaatgagacaaacgcggccataacagcggaatgacaccggtaaaccgaaaggcaggaacaggagagcgcacgagggagccgccagggggaaacgcctggtatctttatagtcctgtcgggtttcgccaccactgatttgagcgtcagatttcgtgatgcttgtcaggggggcggagcctatggaaaaacggctttgccgcggccctctcacttccctgttaagtatcttcctggcatcttccaggaaatctccgccccgttcgtaagccatttccgctcgccgcagtcgaacgaccgagcgtagcgagtcagtgagcgaggaagcggaatatatcctgtatcacatattctgctgacgcaccggtgcagccttttttctcctgccacatgaagcacttcactgacaccctcatcagtgccaacatagtaagccagtatacactccgctagcgcgcaagcggccgca

SEQ ID NO: 40 - DNA, 4953 bp, Artificial Sequence
  source: /note="Description of Artificial Sequence: Synthetic polynucleotide"
cactctgtgacttggtctcatgcctgagaccgcagctggcacgacaggtttcccgactggaaagcgggcagtgagcgcaacgcaattaatgtgagttagctcactcattaggcaccccaggctttacactttatgcttccggctcgtatgttgtgtggaattgtgagcggataacaatttcacacaggaaacagctatgaccatgattacgccaagcttgcatgcctgcaggtcgactctagaggatccccgggtaccgagctcgaattcactggccgtcgttttacaacgtcgtgactgggaaaaccctggcgttacccaacttaatcgccttgcagcacatccccctttcgccagctggcgtaatagcgaagaggcccgcaccgatcgcccttcccaacagttgcgcagcctgaatggcgaatggcgcctgatgcggtattttctccttacgcatctgtgcggtatttcacaccgcatatggtgcactctcagtacaatctgctctgatgccgcatagttaagccagccccgacacccgccaacacccgctgacgcgccctgacgggcttgtctgctcccggcatccgcttacagacaagctgtgacggtctcacagatgagaccaagtcacgaagtggtttaaactatcagtgtttgacaggatatattggcgggtaaacctaagagaaaagagcgtttattagaataatcggatatttaaaagggcgtgaaaaggtttatccgttcgtccatttgtatgtgcatgccaaccacagggttccccagatcaggcgctggctgctgaacccccagccggaactgaccccacaaggccctagcgtttgcaatgcaccaggtcatcattgacccaggcgtgttccaccaggccgctgcctcgcaactcttcgcaggcttcgccgacctgctcgcgccacttcttcacgcgggtggaatccgatccgcacatgaggcggaaggtttccagcttgagcgggtacggctcccggtgcgagctgaaatagtcgaacatccgtcgggccgtcggcgacagcttgcggtacttctcccatatgaatttcgtgtagtggtcgccagcaaacagcacgacgatttcctcgtcgatcaggacctggcaacgggacgttttcttgccacggtccaggacgcggaagcggtgcagcagcgacaccgattccaggtgcccaacgcggtcggacgtgaagcccatcgccgtcgcctgtaggcgcgacaggcattcctcggccttcgtgtaataccggccattgatcgaccagcccaggtcctggcaaagctcgtagaacgtgaaggtgatcggctcgccgataggggtgcgcttcgcgtactccaacacctgctgccacaccagttcgtcatcgtcggcccgcagctcgacgccggtgtaggtgatcttcacgtccttgttgacgtggaaaatgaccttgttttgcagcgcctcgcgcgggattttcttgttgcgcgtggtgaacagggcagagcgggccgtgtcgtttggcatcgctcgcatcgtgtccggccacggcgcaatatcgaacaaggaaagctgcatttccttgatctgctgcttcgtgtgtttcagcaacgcggcctgcttggcctcgctgacctgttttgccaggtcctcgccggcggtttttcgcttcttggtcgtcatagttcctcgcgtgtcgatggtcatcgacttcgccaaacctgccgcctcctgttcaagacgacgcgaacgctccacggcggccgatggcgcgggcagggcagggggagccagttgcacgctgtcgcgctcgatcttggccgtagcttgctggaccatcgagccgacggactggaaggtttcgcggggcgcacgcatgacggtgcggcttgcgatggtttcggcatcctcggcggaaaaccccgcgtcgatcagttcttgcctgtatgccttccggtcaaacgtccgattcattcaccctccttgcgggattgccccgactcacgccggggcaatgtgcccttattcctgatttgacccgcctggtgccttggtgtccagataatccaccttatcggcaatgaagtcggtcccgtagaccgtctggccgtccttctcgtacttggtattccgaatcttgccctgcacgaataccagcgaccccttgcccaaatacttgccgtgggcctcggcctgagagccaaaacacttgatgcggaagaagtcggtgcgctcctgcttgtcgccggcatcgttgcgccacatctaggatctgccaggaaccgtaaaaaggccgcgttgctggcgtttttccataggctccgcccccctgacgagcatcacaaaaatcgacgctcaagtcagaggtggcgaaacccgacaggactataaagataccaggcgtttccccctggaagctccctcgtgcgctctcctgttccgaccctgccgcttaccggatacctgtccgcctttctcccttcgggaagcgtggcgctttctcatagctcacgctgtaggtatctcagttcggtgtaggtcgttcgctccaagctgggctgtgtgcacgaaccccccgttcagcccgaccgctgcgccttatccggtaactatcgtcttgagtccaacccggtaagacacgacttatcgccactggcagcagccactggtaacaggattagcagagcgaggtatgtaggcggtgctacagagttcttgaagtggtggcctaactacggctacactagaaggacagtatttggtatctgcgctctgctgaagccagttaccttcggaaaaagagttggtagctcttgatccggcaaacaaaccaccgctggtagcggtggtttttttgtttgcaagcagcagattacgcgcagaaaaaaaggatctcaagaagatcctttgatcttttctacggggtctgacgctcagtggaacgaaaactcacgttaagggattttggtcatgagattatcaaaaaggatcttcacctagatccttttaaattaaaaatgaagttttaaatcaatctaaagtatatatgagtaaacttggtctgacagttaccaatgcttaatcagtgaggcacctatctcagcgatctgtctatttcgttcatccatagttgcctgactccccgtcgtgtagataactacgatacgggagggcttaccatctggccccagtgctgcaatgataccgcgagaaccacgctcaccggctccagatttatcagcaataaaccagccagccggaagggccgagcgcagaagtggtcctgcaactttatccgcctccatccagtctattaattgttgccgggaagctagagtaagtagttcgccagttaatagtttgcgcaacgttgttgccattgctacaggcatcgtggtgtcacgctcgtcgtttggtatggcttcattcagctccggttcccaacgatcaaggcgagttacatgatcccccatgttgtgcaaaaaagcggttagctccttcggtcctccgatcgttgtcagaagtaagttggccgcagtgttatcactcatggttatggcagcactgcataattctcttactgtcatgccatccgtaagatgcttttctgtgactggtgagtactcaaccaagtcattctgagaatagtgtatgcggcgaccgagttgctcttgcccggcgtcaatacgggataataccgcgccacatagcagaactttaaaagtgctcatcattggaaaacgttcttcggggcgaaaactctcaaggatcttaccgctgttgagatccagttcgatgtaacccactcgtgcacccaactgatcttcagcatcttttactttcaccagcgtttctgggtgagcaaaaacaggaaggcaaaatgccgcaaaaaagggaataagggcgacacggaaatgttgaatactcatactcttcctttttcaatattattgaagcatttatcagggttattgtctcatgagcggatacatatttgaatgtatttagaaaaataaacaaataggggttccgcgcacgaattggccagcgctgccatttttggggtgaggccgttcgcggccgaggggcgcagcccctggggggatgggaggcccgcgttagcgggccgggagggttcgagaagggggggcaccccccttcggcgtgcgcggtcacgcgcacagggcgcagccctggttaaaaacaaggtttataaatattggtttaaaagcaggttaaaagacaggttagcggtggccgaaaaacgggcggaaacccttgcaaatgctggattttctgcctgtggacagcccctcaaatgtcaataggtgcgcccctcatctgtcagcactctgcccctcaagtgtcaaggatcgcgcccctcatctgtcagtagtcgcgcccctcaagtgtcaataccgcagggcacttatccccaggcttgtccacatcatctgtgggaaactcgcgtaaaatcaggcgttttcgccgatttgcgaggctggccagctccacgtcgccggccgaaatcgagcctgcccctcatctgtcaacgccgcgccgggtgagtcggcccctcaagtgtcaacgtccgcccctcatctgtcagtgagggccaagttttccgcgaggtatccacaacgccggcggccgcggtgtctcgcacacggcttcgacggcgtttctggcgcgtttgcagggccatagacggccgccagcccagcggcgagggcaaccagcccggtgagcgtcgcaaaggagatcctgatctgactgatgggctgcctgtatcgagtggtgattttgtgccgagctgccggtcggggagctgttggctggctggtggcaggatatattgtggtgtaaacaaattgacgcttagacaacttaataacacattgcggacgtttttaatgtactggggtggatgcagtgggccc

SEQ ID NO: 41 - DNA, 4947 bp, Artificial Sequence
  source: /note="Description of Artificial Sequence: Synthetic polynucleotide"
cactctgtgaagacgctgccttgtcttcgcagctggcacgacaggtttcccgactggaaagcgggcagtgagcgcaacgcaattaatgtgagttagctcactcattaggcaccccaggctttacactttatgcttccggctcgtatgttgtgtggaattgtgagcggataacaatttcacacaggaaacagctatgaccatgattacgccaagcttgcatgcctgcaggtcgactctagaggatccccgggtaccgagctcgaattcactggccgtcgttttacaacgtcgtgactgggaaaaccctggcgttacccaacttaatcgccttgcagcacatccccctttcgccagctggcgtaatagcgaagaggcccgcaccgatcgcccttcccaacagttgcgcagcctgaatggcgaatggcgcctgatgcggtattttctccttacgcatctgtgcggtatttcacaccgcatatggtgcactctcagtacaatctgctctgatgccgcatagttaagccagccccgacacccgccaacacccgctgacgcgccctgacgggcttgtctgctcccggcatccgcttacagacaagctgtgacgaagacaacagagcgtcttcacgaagtggtttaaactatcagtgtttgacaggatatattggcgggtaaacctaagagaaaagagcgtttattagaataatcggatatttaaaagggcgtgaaaaggtttatccgttcgtccatttgtatgtgcatgccaaccacagggttccccagatcaggcgctggctgctgaacccccagccggaactgaccccacaaggccctagcgtttgcaatgcaccaggtcatcattgacccaggcgtgttccaccaggccgctgcctcgcaactcttcgcaggcttcgccgacctgctcgcgccacttcttcacgcgggtggaatccgatccgcacatgaggcggaaggtttccagcttgagcgggtacggctcccggtgcgagctgaaatagtcgaacatccgtcgggccgtcggcgacagcttgcggtacttctcccatatgaatttcgtgtagtggtcgccagcaaacagcacgacgatttcctcgtcgatcaggacctggcaacgggacgttttcttgccacggtccaggacgcggaagcggtgcagcagcgacaccgattccaggtgcccaacgcggtcggacgtgaagcccatcgccgtcgcctgtaggcgcgacaggcattcctcggccttcgtgtaataccggccattgatcgaccagcccaggtcctggcaaagctcgtagaacgtgaaggtgatcggctcgccgataggggtgcgcttcgcgtactccaacacctgctgccacaccagttcgtcatcgtcggcccgcagctcgacgccggtgtaggtgatcttcacgtccttgttgacgtggaaaatgaccttgttttgcagcgcctcgcgcgggattttcttgttgcgcgtggtgaacagggcagagcgggccgtgtcgtttggcatcgctcgcatcgtgtccggccacggcgcaatatcgaacaaggaaagctgcatttccttgatctgctgcttcgtgtgtttcagcaacgcggcctgcttggcctcgctgacctgttttgccaggtcctcgccggcggtttttcgcttcttggtcgtcatagttcctcgcgtgtcgatggtcatcgacttcgccaaacctgccgcctcctgttcaagacgacgcgaacgctccacggcggccgatggcgcgggcagggcagggggagccagttgcacgctgtcgcgctcgatcttggccgtagcttgctggaccatcgagccgacggactggaaggtttcgcggggcgcacgcatgacggtgcggcttgcgatggtttcggcatcctcggcggaaaaccccgcgtcgatcagttcttgcctgtatgccttccggtcaaacgtccgattcattcaccctccttgcgggattgccccgactcacgccggggcaatgtgcccttattcctgatttgacccgcctggtgccttggtgtccagataatccaccttatcggcaatgaagtcggtcccgtagaccgtctggccgtccttctcgtacttggtattccgaatcttgccctgcacgaataccagcgaccccttgcccaaatacttgccgtgggcctcggcctgagagccaaaacacttgatgcggaagaagtcggtgcgctcctgcttgtcgccggcatcgttgcgccacatctaggatctgccaggaaccgtaaaaaggccgcgttgctggcgtttttccataggctccgcccccctgacgagcatcacaaaaatcgacgctcaagtcagaggtggcgaaacccgacaggactataaagataccaggcgtttccccctggaagctccctcgtgcgctctcctgttccgaccctgccgcttaccggatacctgtccgcctttctcccttcgggaagcgtggcgctttctcatagctcacgctgtaggtatctcagttcggtgtaggtcgttcgctccaagctgggctgtgtgcacgaaccccccgttcagcccgaccgctgcgccttatccggtaactatcgtcttgagtccaacccggtaagacacgacttatcgccactggcagcagccactggtaacaggattagcagagcgaggtatgtaggcggtgctacagagttcttgaagtggtggcctaactacggctacactagaaggacagtatttggtatctgcgctctgctgaagccagttaccttcggaaaaagagttggtagctcttgatccggcaaacaaaccaccgctggtagcggtggtttttttgtttgcaagcagcagattacgcgcagaaaaaaaggatctcaagaagatcctttgatcttttctacggggtctgacgctcagtggaacgaaaactcacgttaagggattttggtcatgagattatcaaaaaggatcttcacctagatccttttaaattaaaaatgaagttttaaatcaatctaaagtatatatgagtaaacttggtctgacagttaccaatgcttaatcagtgaggcacctatctcagcgatctgtctatttcgttcatccatagttgcctgactccccgtcgtgtagataactacgatacgggagggcttaccatctggccccagtgctgcaatgataccgcgagaaccacgctcaccggctccagatttatcagcaataaaccagccagccggaagggccgagcgcagaagtggtcctgcaactttatccgcctccatccagtctattaattgttgccgggaagctagagtaagtagttcgccagttaatagtttgcgcaacgttgttgccattgctacaggcatcgtggtgtcacgctcgtcgtttggtatggcttcattcagctccggttcccaacgatcaaggcgagttacatgatcccccatgttgtgcaaaaaagcggttagctccttcggtcctccgatcgttgtcagaagtaagttggccgcagtgttatcactcatggttatggcagcactgcataattctcttactgtcatgccatccgtaagatgcttttctgtgactggtgagtactcaaccaagtcattctgagaatagtgtatgcggcgaccgagttgctcttgcccggcgtcaatacgggataataccgcgccacatagcagaactttaaaagtgctcatcattggaaaacgttcttcggggcgaaaactctcaaggatcttaccgctgttgagatccagttcgatgtaacccactcgtgcacccaactgatcttcagcatcttttactttcaccagcgtttctgggtgagcaaaaacaggaaggcaaaatgccgcaaaaaagggaataagggcgacacggaaatgttgaatactcatactcttcctttttcaatattattgaagcatttatcagggttattgtctcatgagcggatacatatttgaatgtatttagaaaaataaacaaataggggttccgcgcacgaattggccagcgctgccatttttggggtgaggccgttcgcggccgaggggcgcagcccctggggggatgggaggcccgcgttagcgggccgggagggttcgagaagggggggcaccccccttcggcgtgcgcggtcacgcgcacagggcgcagccctggttaaaaacaaggtttataaatattggtttaaaagcaggttaaaagacaggttagcggtggccgaaaaacgggcggaaacccttgcaaatgctggattttctgcctgtggacagcccctcaaatgtcaataggtgcgcccctcatctgtcagcactctgcccctcaagtgtcaaggatcgcgcccctcatctgtcagtagtcgcgcccctcaagtgtcaataccgcagggcacttatccccaggcttgtccacatcatctgtgggaaactcgcgtaaaatcaggcgttttcgccgatttgcgaggctggccagctccacgtcgccggccgaaatcgagcctgcccctcatctgtcaacgccgcgccgggtgagtcggcccctcaagtgtcaacgtccgcccctcatctgtcagtgagggccaagttttccgcgaggtatccacaacgccggcggccgcggtgtctcgcacacggcttcgacggcgtttctggcgcgtttgcagggccatagacggccgccagcccagcggcgagggcaaccagcccggtgagcgtcgcaaaggagatcctgatctgactgatgggctgcctgtatcgagtggtgattttgtgccgagctgccggtcggggagctgttggctggctggtggcaggatatattgtggtgtaaacaaattgacgcttagacaacttaataacacattgcggacgtttttaatgtactggggtggatgcagtgggccc

SEQ ID NO: 42 - DNA, 4951 bp, Artificial Sequence
  source: /note="Description of Artificial Sequence: Synthetic polynucleotide"
cactctgtgaagctcttcagcgtgaagagcgcagctggcacgacaggtttcccgactggaaagcgggcagtgagcgcaacgcaattaatgtgagttagctcactcattaggcaccccaggctttacactttatgcttccggctcgtatgttgtgtggaattgtgagcggataacaatttcacacaggaaacagctatgaccatgattacgccaagcttgcatgcctgcaggtcgactctagaggatccccgggtaccgagctcgaattcactggccgtcgttttacaacgtcgtgactgggaaaaccctggcgttacccaacttaatcgccttgcagcacatccccctttcgccagctggcgtaatagcgaagaggcccgcaccgatcgcccttcccaacagttgcgcagcctgaatggcgaatggcgcctgatgcggtattttctccttacgcatctgtgcggtatttcacaccgcatatggtgcactctcagtacaatctgctctgatgccgcatagttaagccagccccgacacccgccaacacccgctgacgcgccctgacgggcttgtctgctcccggcatccgcttacagacaagctgtgacgctcttcatagtgaagagcttcacgaagtggtttaaactatcagtgtttgacaggatatattggcgggtaaacctaagagaaaagagcgtttattagaataatcggatatttaaaagggcgtgaaaaggtttatccgttcgtccatttgtatgtgcatgccaaccacagggttccccagatcaggcgctggctgctgaacccccagccggaactgaccccacaaggccctagcgtttgcaatgcaccaggtcatcattgacccaggcgtgttccaccaggccgctgcctcgcaactcttcgcaggcttcgccgacctgctcgcgccacttcttcacgcgggtggaatccgatccgcacatgaggcggaaggtttccagcttgagcgggtacggctcccggtgcgagctgaaatagtcgaacatccgtcgggccgtcggcgacagcttgcggtacttctcccatatgaatttcgtgtagtggtcgccagcaaacagcacgacgatttcctcgtcgatcaggacctggcaacgggacgttttcttgccacggtccaggacgcggaagcggtgcagcagcgacaccgattccaggtgcccaacgcggtcggacgtgaagcccatcgccgtcgcctgtaggcgcgacaggcattcctcggccttcgtgtaataccggccattgatcgaccagcccaggtcctggcaaagctcgtagaacgtgaaggtgatcggctcgccgataggggtgcgcttcgcgtactccaacacctgctgccacaccagttcgtcatcgtcggcccgcagctcgacgccggtgtaggtgatcttcacgtccttgttgacgtggaaaatgaccttgttttgcagcgcctcgcgcgggattttcttgttgcgcgtggtgaacagggcagagcgggccgtgtcgtttggcatcgctcgcatcgtgtccggccacggcgcaatatcgaacaaggaaagctgcatttccttgatctgctgcttcgtgtgtttcagcaacgcggcctgcttggcctcgctgacctgttttgccaggtcctcgccggcggtttttcgcttcttggtcgtcatagttcctcgcgtgtcgatggtcatcgacttcgccaaacctgccgcctcctgttcaagacgacgcgaacgctccacggcggccgatggcgcgggcagggcagggggagccagttgcacgctgtcgcgctcgatcttggccgtagcttgctggaccatcgagccgacggactggaaggtttcgcggggcgcacgcatgacggtgcggcttgcgatggtttcggcatcctcggcggaaaaccccgcgtcgatcagttcttgcctgtatgccttccggtcaaacgtccgattcattcaccctccttgcgggattgccccgactcacgccggggcaatgtgcccttattcctgatttgacccgcctggtgccttggtgtccagataatccaccttatcggcaatgaagtcggtcccgtagaccgtctggccgtccttctcgtacttggtattccgaatcttgccctgcacgaataccagcgaccccttgcccaaatacttgccgtgggcctcggcctgagagccaaaacacttgatgcggaagaagtcggtgcgctcctgcttgtcgccggcatcgttgcgccacatctaggatctgccaggaaccgtaaaaaggccgcgttgctggcgtttttccataggctccgcccccctgacgagcatcacaaaaatcgacgctcaagtcagaggtggcgaaacccgacaggactataaagataccaggcgtttccccctggaagctccctcgtgcgctctcctgttccgaccctgccgcttaccggatacctgtccgcctttctcccttcgggaagcgtggcgctttctcatagctcacgctgtaggtatctcagttcggtgtaggtcgttcgctccaagctgggctgtgtgcacgaaccccccgttcagcccgaccgctgcgccttatccggtaactatcgtcttgagtccaacccggtaagacacgacttatcgccactggcagcagccactggtaacaggattagcagagcgaggtatgtaggcggtgctacagagttcttgaagtggtggcctaactacggctacactagaaggacagtatttggtatctgcgctctgctgaagccagttaccttcggaaaaagagttggtagctcttgatccggcaaacaaaccaccgctggtagcggtggtttttttgtttgcaagcagcagattacgcgcagaaaaaaaggatctcaagaagatcctttgatcttttctacggggtctgacgctcagtggaacgaaaactcacgttaagggattttggtcatgagattatcaaaaaggatcttcacctagatccttttaaattaaaaatgaagttttaaatcaatctaaagtatatatgagtaaacttggtctgacagttaccaatgcttaatcagtgaggcacctatctcagcgatctgtctatttcgttcatccatagttgcctgactccccgtcgtgtagataactacgatacgggagggcttaccatctggccccagtgctgcaatgataccgcgagaaccacgctcaccggctccagatttatcagcaataaaccagccagccggaagggccgagcgcagaagtggtcctgcaactttatccgcctccatccagtctattaattgttgccgggaagctagagtaagtagttcgccagttaatagtttgcgcaacgttgttgccattgctacaggcatcgtggtgtcacgctcgtcgtttggtatggcttcattcagctccggttcccaacgatcaaggcgagttacatgatcccccatgttgtgcaaaaaagcggttagctccttcggtcctccgatcgttgtcagaagtaagttggccgcagtgttatcactcatggttatggcagcactgcataattctcttactgtcatgccatccgtaagatgcttttctgtgactggtgagtactcaaccaagtcattctgagaatagtgtatgcggcgaccgagttgctcttgcccggcgtcaatacgggataataccgcgccacatagcagaactttaaaagtgctcatcattggaaaacgttcttcggggcgaaaactctcaaggatcttaccgctgttgagatccagttcgatgtaacccactcgtgcacccaactgatcttcagcatcttttactttcaccagcgtttctgggtgagcaaaaacaggaaggcaaaatgccgcaaaaaagggaataagggcgacacggaaatgttgaatactcatactcttcctttttcaatattattgaagcatttatcagggttattgtctcatgagcggatacatatttgaatgtatttagaaaaataaacaaataggggttccgcgcacgaattggccagcgctgccatttttggggtgaggccgttcgcggccgaggggcgcagcccctggggggatgggaggcccgcgttagcgggccgggagggttcgagaagggggggcaccccccttcggcgtgcgcggtcacgcgcacagggcgcagccctggttaaaaacaaggtttataaatattggtttaaaagcaggttaaaagacaggttagcggtggccgaaaaacgggcggaaacccttgcaaatgctggattttctgcctgtggacagcccctcaaatgtcaataggtgcgcccctcatctgtcagcactctgcccctcaagtgtcaaggatcgcgcccctcatctgtcagtagtcgcgcccctcaagtgtcaataccgcagggcacttatccccaggcttgtccacatcatctgtgggaaactcgcgtaaaatcaggcgttttcgccgatttgcgaggctggccagctccacgtcgccggccgaaatcgagcctgcccctcatctgtcaacgccgcgccgggtgagtcggcccctcaagtgtcaacgtccgcccctcatctgtcagtgagggccaagttttccgcgaggtatccacaacgccggcggccgcggtgtctcgcacacggcttcgacggcgtttctggcgcgtttgcagggccatagacggccgccagcccagcggcgagggcaaccagcccggtgagcgtcgcaaaggagatcctgatctgactgatgggctgcctgtatcgagtggtgattttgtgccgagctgccggtcggggagctgttggctggctggtggcaggatatattgtggtgtaaacaaattgacgcttagacaacttaataacacattgcggacgtttttaatgtactggggtggatgcagtgggccc

SEQ ID NO: 43 - DNA, 7676 bp, Artificial Sequence
  source: /note="Description of Artificial Sequence: Synthetic polynucleotide"
cactctgtgacttggtctcatgcctgagaccgtcagaccaagtttactcatatatactttagattgatttaaaacttcatttttaatttaaaaggatctaggtgaagatcctttttgataatctcatgaccaaaatcccttaacgtgagttttcgttccactgagcgtcagaccccgtagaaaagatcaaaggatcttcttgagatcctttttttctgcgcgtaatctgctgcttgcaaacaaaaaaaccaccgctaccagcggtggtttgtttgccggatcaagagctaccaactctttttccgaaggtaactggcttcagcagagcgcagataccaaatactgtccttctagtgtagccgtagttaggccaccacttcaagaactctgtagcaccgcctacatacctcgctctgctaatcctgttaccagtggctgctgccagtggcgataagtcgtgtcttaccgggttggactcaagacgatagttaccggataaggcgcagcggtcgggctgaacggggggttcgtgcacacagcccagcttggagcgaacgacctacaccgaactgagatacctacagcgtgagctatgagaaagcgccacgcttcccgaagggagaaaggcggacaggtatccggtaagcggcagggtcggaacaggagagcgcacgagggagcttccagggggaaacgcctggtatctttatagtcctgtcgggtttcgccacctctgacttgagcgtcgatttttgtgatgctcgtcaggggggcggagcctatggaaaaacgccagcaacgcggcctttttacggttcctggccttttgctggccttttgctcacatgttctttcctgcgttatcccctgattctgtggataaccgtattaccgcctttgagtgagctgataccgctcgccgcagccgaacgaccgagcgcagcgagtcagtgagcgaggaagcggatgagcgcccaatacgcaaaccgcctctccccgcgcgttggccgattcattaatgcagctggcacgacaggtttcccgactggaaagcgggcagtgagcgcaacgcaattaatgtgagttagctcactcattaggcaccccaggctttacactttatgcttccggctcgtatgttgtgtggaattgtgagcggataacaatttcacacaggaaacagctatgaccatgattacgccaagcttgcatgcctgcaggtcgactctagaggatccccgggtaccgagctcgaattcactggccgtcgttttacaacgtcgtgactgggaaaaccctggcgttacccaacttaatcgccttgcagcacatccccctttcgccagctggcgtaatagcgaagaggcccgcaccgatcgcccttcccaacagttgcgcagcctgaatggcgaatggcgcctgatgcggtattttctccttacgcatctgtgcggtatttcacaccgcatatggtgcactctcagtacaatctgctctgatgccgcatagttaagccagccccgacacccgccaacacccgctgacgcgccctgacgggcttgtctgctcccggcatccgcttacagacaagctgtgacggtctcacttctgagaccaagtcacgaagtgtgcggccgccttcagcggccgcacgaatccatgtgggagtttattcttgacacagatatttatgatataataactgagtaagcttaacataaggaggaaaaacatatgttacgcagcagcaacgatgttacgcagcagggcagtcgccctaaaacaaagttaggtggctcaagtatgggcatcattcgcacatgtaggctcggccctgaccaagtcaaatccatgcgggctgctcttgatcttttcggtcgtgagttcggagacgtagccacctactcccaacatcagccggactccgattacctcgggaacttgctccgtagtaagacattcatcgcgcttgctgccttcgaccaagaagcggttgttggcgctctcgcggcttacgttctgcccaagtttgagcagccgcgtagtgagatctatatctatgatctcgcagtctccggcgagcaccggaggcagggcattgccaccgcgctcatcaatctcctcaagcatgaggccaacgcgcttggtgcttatgtgatctacgtgcaagcagattacggtgacgatcccgcagtggctctctatacaaagttgggcatacgggaagaagtgatgcactttgatatcgacccaagtaccgccacctaagagctggagcggcgtaaccgtcgcacaggaaggacagagaaagcgcggatctgggaagtgacggacagaacggtcaggacctggattggggaggcggttgccgccgctgctgctgacggtgtgacgttctctgttccggtcacaccacatacgttccgccattcctatgcgatgcacatgctgtatgccggtataccgctgaaagttctgcaaagcctgatgggacataagtccatcagttcaacggaagtctacacgaaggtttttgcgctggatgtggctgcccggctccgggtgcagtttgcgatgccggagtctgatgcggttgcgatgctgaaacaattatcctgagaataaatgccttggcctttatatggaaatgtggaactgagtggatatgctgtttttgtctgttaaacagagaagctggctgttatccactgagaagcgaacgaaacagtcgggaaaatctcccattatcgtagagatccgcattattaatctcaggagcctgtgtagcgtttataggaagtagtgttctgtcatgatgcctgcaagcggtaacgaaaacgatttgaatatgccttcaggaacaatagaaatcttcgtgcggtgttacgttgaagtggagcggattatgtcagcaatggacagaacaacctaatgaacacagaaccatgatgtggtctgtccttttacagccagtagtgctcgccgcagtcgagcgacagggcgaagccctcgagtgagcgaggaagcaccagggaacagcacttatatattctgcttacacacgatgcctgaaaaaacttcccttggggttatccacttatccacggggatatttttataattattttttttatagtttttagatcttcttttttagagcgccttgtaggcctttatccatgctggttctagagaaggtgttgtgacaaattgccctttcagtgtgacaaatcaccctcaaatgacagtcctgtctgtgacaaattgcccttaaccctgtgacaaattgccctcagaagaagctgttttttcacaaagttatccctgcttattgactcttttttatttagtgtgacaatctaaaaacttgtcacacttcacatggatctgtcatggcggaaacagcggttatcaatcacaagaaacgtaaaaatagcccgcgaatcgtccagtcaaacgacctcactgaggcggcatatagtctctcccgggatcaaaaacgtatgctgtatctgttcgttgaccagatcagaaaatctgatggcaccctacaggaacatgacggtatctgcgagatccatgttgctaaatatgctgaaatattcggattgacctctgcggaagccagtaaggatatacggcaggcattgaagagtttcgcggggaaggaagtggttttttatcgccctgaagaggatgccggcgatgaaaaaggctatgaatcttttccttggtttatcaaacgtgcgcacagtccatccagagggctttacagtgtacatatcaacccatatctcattcccttctttatcgggttacagaaccggtttacgcagtttcggcttagtgaaacaaaagaaatcaccaatccgtatgccatgcgtttatacgaatccctgtgtcagtatcgtaagccggatggctcaggcatcgtgtctctgaaaatcgactggatcatagagcgttaccagctgcctcaaagttaccagcgtatgcctgacttccgccgccgcttcctgcaggtctgtgttaatgagatcaacagcagaactccaatgcgcctctcatacattgagaaaaagaaaggccgccagacgactcatatcgtattttccttccgcgatatcacttccatgacgacaggatagtctgagggttatctgtcacagatttgagggtggttcgtcacatttgttctgacctactgagggtaatttgtcacagttttgctgtttccttcagcctgcatggattttctcatactttttgaactgtaatttttaaggaagccaaatttgagggcagtttgtcacagttgatttccttctctttcccttcgtcatgtgacctgatatcgggggttagttcgtcatcattgatgagggttgattatcacagtttattactctgaattggctatccgcgtgtgtacctctacctggagtttttcccacggtggatatttcttcttgcgctgagcgtaagagctatctgacagaacagttcttctttgcttcctcgccagttcgctcgctatgctcggttacacggctgcggcgagcgctagtgataataagtgactgaggtatgtggtgttcttatctccttttgtagtgttgctcttattttaaacaactttgcggttttttgatgactttgcgattttgttgttgctttgcagtaaattgcaagatttaataaaaaaacgcaaagcaatgattaaaggatgttcagaatgaaactcatggaaacacttaaccagtgcataaacgctggtcatgaaatgacgaaggctatcgccattgcacagtttaatgatgacagcccggaagcgaggaaaataacccggcgctggagaataggtgaagcagcggatttagttggggtttcttctcaggctatcagagatgccgagaaagcagggcgactaccgcacccggatatggaaattcgaggacgggttgagcaacgtgttggttatacaattgaacaaattaatcatatgcgtgatgtgtttggtacgcgattgcgacgtgctgaggacgtatttccaccggtgatcggggttgctgcccataaaggtggcgtttacaaaacctcagtttctgttcatcttgctcaggatctggctctgaaggggctacgtgttttgctcgtggaaggtaacgacccccagggaacagcctcaatgtatcacggatgggtaccagatcttcatattcatgcagaagatactctcctgcctttctatcttggggaaaaggacgatgtcacttatgcaataaagcccacttgctggccggggcttgacattattccttcctgtctggctctgcaccgtattgaaactgagttaatgggcaaatttgatgaaggtaaactgcccaccgatccacacctgatgctccgactggccattgaaactgttgctcatgactatgatgtcatagttattgacagcgcgcctaacctgggtatcggcacgattaatgtcgtatgtgctgctgatgtgctgattgttcccacgcctgctgagttgtttgactacacctccgcactgcagtttttcgatatgcttcgtgatctgctcaagaacgttgatcttaaagggttcgagcctgatgtacgtattttgcttaccaaatacagcaatagtaatggctctcagtccccgtggatggaggagcaaattcgggatgcctggggaagcatggttctaaaaaatgttgtacgtgaaacggatgaagttggtaaaggtcagatccggatgagaactgtttttgaacaggccattgatcaacgcagttcaactggtgcctggagaaatgctctttctatttgggaacctgtctgcaatgaaattttcgatcgtctgattaaaccacgctgggagattagataatgaagcgtgcgcctgttattccaaaacatacgctcaatactcaaccggttgaagatacttcgttatcgacaccagctgccccgatggtggattcgttaattgcgcgcgtaggagtaatggctcgcggtaatgccattactttgcctgtatgtggtcgggatgtgaagtttactcttgaagtgctccggggtgatagtgttgagaaaacctctcgggtatggtcaggtaatgaacgtgaccaggagctgcttactgaggacgcactggatgatctcatcccttcttttctactgactggtcaacagacaccggcgttcggtcgaagagtatctggtgtcatagaaattgccgatgggagtcgccgtcgtaaagctgctgcacttaccgaaagtgattatcgtgttctggttggcgagctggatgatgagcagatggctgcattatccagattgggtaacgattatcgcccaacaagtgcttatgaacgtggtcagcgttatgcaagccgattgcagaatgaatttgctggaaatatttctgcgctggctgatgcggaaaatatttcacgtaagattattacccgctgtatcaacaccgccaaattgcctaaatcagttgttgctcttttttctcaccccggtgaactatctgcccggtcaggtgatgcacttcaaaaagcctttacagataaagaggaattacttaagcagcaggcatctaaccttcatgagcagaaaaaagctggggtgatatttgaagctgaagaagttatcactcttttaacttctgtgcttaaaacgtcatctgcatcaagaactagtttaagctcacgacatcagtttgctcctggagcgacagtattgtataagggcgataaaatggtgcttaacctggacaggtcacgtgttccaactgagtgtatagagaaaattgaggccattcttaaggaacttgaaaagccagcaccctgatgcgaccacgttttagtctacgtttatctgtctttacttaatgtcctttgttacaggccagaaagcataactggcctgaatattctctctgggcccactgttccacttgtatcgtcggtctgataatcagactgggaccacggtcccactcgtatcgtcggtctgattattagtctgggaccacggtcccactcgtatcgtcggtctgattattagtctgggaccacggtcccactcgtatcgtcggtctgataatcagactgggaccacggtcccactcgtatcgtcggtctgattattagtctgggaccatggtcccactcgtatcgtcggtctgattattagtctgggaccacggtcccactcgtatcgtcggtctgattattagtctggaaccacggtcccactcgtatcgtcggtctgattattagtctgggaccacggtcccactcgtatcgtcggtctgattattagtctgggaccacgatcccactcgtgttgtcggtctgattatcggtctgggaccacggtcccacttgtattgtcgatcagactatcagcgtgagactacgattccatcaatgcctgtcaagggcaagtattgacatgtcgtcgtaacctgtagaacggagtaacctcggtgtgcggttgtatgcctgctgtggattgctgctgtgtcctgcttatccacaacattttgcgcacggttatgtggacaaaatacctggttacccaggccgtgccggcacgttaaccgggctgcatccgatgcaagtgtgtcgctgtcgacgcaagcggccgca

SEQ ID NO: 44 - DNA, 7676 bp, Artificial Sequence
  source: /note="Description of Artificial Sequence: Synthetic polynucleotide"
cactctgtgacttggtctcacttctgagaccgtcagaccaagtttactcatatatactttagattgatttaaaacttcatttttaatttaaaaggatctaggtgaagatcctttttgataatctcatgaccaaaatcccttaacgtgagttttcgttccactgagcgtcagaccccgtagaaaagatcaaaggatcttcttgagatcctttttttctgcgcgtaatctgctgcttgcaaacaaaaaaaccaccgctaccagcggtggtttgtttgccggatcaagagctaccaactctttttccgaaggtaactggcttcagcagagcgcagataccaaatactgtccttctagtgtagccgtagttaggccaccacttcaagaactctgtagcaccgcctacatacctcgctctgctaatcctgttaccagtggctgctgccagtggcgataagtcgtgtcttaccgggttggactcaagacgatagttaccggataaggcgcagcggtcgggctgaacggggggttcgtgcacacagcccagcttggagcgaacgacctacaccgaactgagatacctacagcgtgagctatgagaaagcgccacgcttcccgaagggagaaaggcggacaggtatccggtaagcggcagggtcggaacaggagagcgcacgagggagcttccagggggaaacgcctggtatctttatagtcctgtcgggtttcgccacctctgacttgagcgtcgatttttgtgatgctcgtcaggggggcggagcctatggaaaaacgccagcaacgcggcctttttacggttcctggccttttgctggccttttgctcacatgttctttcctgcgttatcccctgattctgtggataaccgtattaccgcctttgagtgagctgataccgctcgccgcagccgaacgaccgagcgcagcgagtcagtgagcgaggaagcggatgagcgcccaatacgcaaaccgcctctccccgcgcgttggccgattcattaatgcagctggcacgacaggtttcccgactggaaagcgggcagtgagcgcaacgcaattaatgtgagttagctcactcattaggcaccccaggctttacactttatgcttccggctcgtatgttgtgtggaattgtgagcggataacaatttcacacaggaaacagctatgaccatgattacgccaagcttgcatgcctgcaggtcgactctagaggatccccgggtaccgagctcgaattcactggccgtcgttttacaacgtcgtgactgggaaaaccctggcgttacccaacttaatcgccttgcagcacatccccctttcgccagctggcgtaatagcgaagaggcccgcaccgatcgcccttcccaacagttgcgcagcctgaatggcgaatggcgcctgatgcggtattttctccttacgcatctgtgcggtatttcacaccgcatatggtgcactctcagtacaatctgctctgatgccgcatagttaagccagccccgacacccgccaacacccgctgacgcgccctgacgggcttgtctgctcccggcatccgcttacagacaagctgtgacggtctcagagctgagaccaagtcacgaagtgtgcggccgccttcagcggccgcacgaatccatgtgggagtttattcttgacacagatatttatgatataataactgagtaagcttaacataaggaggaaaaacatatgttacgcagcagcaacgatgttacgcagcagggcagtcgccctaaaacaaagttaggtggctcaagtatgggcatcattcgcacatgtaggctcggccctgaccaagtcaaatccatgcgggctgctcttgatcttttcggtcgtgagttcggagacgtagccacctactcccaacatcagccggactccgattacctcgggaacttgctccgtagtaagacattcatcgcgcttgctgccttcgaccaagaagcggttgttggcgctctcgcggcttacgttctgcccaagtttgagcagccgcgtagtgagatctatatctatgatctcgcagtctccggcgagcaccggaggcagggcattgccaccgcgctcatcaatctcctcaagcatgaggccaacgcgcttggtgcttatgtgatctacgtgcaagcagattacggtgacgatcccgcagtggctctctatacaaagttgggcatacgggaagaagtgatgcactttgatatcgacccaagtaccgccacctaagagctggagcggcgtaaccgtcgcacaggaaggacagagaaagcgcggatctgggaagtgacggacagaacggtcaggacctggattggggaggcggttgccgccgctgctgctgacggtgtgacgttctctgttccggtcacaccacatacgttccgccattcctatgcgatgcacatgctgtatgccggtataccgctgaaagttctgcaaagcctgatgggacataagtccatcagttcaacggaagtctacacgaaggtttttgcgctggatgtggctgcccggctccgggtgcagtttgcgatgccggagtctgatgcggttgcgatgctgaaacaattatcctgagaataaatgccttggcctttatatggaaatgtggaactgagtggatatgctgtttttgtctgttaaacagagaagctggctgttatccactgagaagcgaacgaaacagtcgggaaaatctcccattatcgtagagatccgcattattaatctcaggagcctgtgtagcgtttataggaagtagtgttctgtcatgatgcctgcaagcggtaacgaaaacgatttgaatatgccttcaggaacaatagaaatcttcgtgcggtgttacgttgaagtggagcggattatgtcagcaatggacagaacaacctaatgaacacagaaccatgatgtggtctgtccttttacagccagtagtgctcgccgcagtcgagcgacagggcgaagccctcgagtgagcgaggaagcaccagggaacagcacttatatattctgcttacacacgatgcctgaaaaaacttcccttggggttatccacttatccacggggatatttttataattattttttttatagtttttagatcttcttttttagagcgccttgtaggcctttatccatgctggttctagagaaggtgttgtgacaaattgccctttcagtgtgacaaatcaccctcaaatgacagtcctgtctgtgacaaattgcccttaaccctgtgacaaattgccctcagaagaagctgttttttcacaaagttatccctgcttattgactcttttttatttagtgtgacaatctaaaaacttgtcacacttcacatggatctgtcatggcggaaacagcggttatcaatcacaagaaacgtaaaaatagcccgcgaatcgtccagtcaaacgacctcactgaggcggcatatagtctctcccgggatcaaaaacgtatgctgtatctgttcgttgaccagatcagaaaatctgatggcaccctacaggaacatgacggtatctgcgagatccatgttgctaaatatgctgaaatattcggattgacctctgcggaagccagtaaggatatacggcaggcattgaagagtttcgcggggaaggaagtggttttttatcgccctgaagaggatgccggcgatgaaaaaggctatgaatcttttccttggtttatcaaacgtgcgcacagtccatccagagggctttacagtgtacatatcaacccatatctcattcccttctttatcgggttacagaaccggtttacgcagtttcggcttagtgaaacaaaagaaatcaccaatccgtatgccatgcgtttatacgaatccctgtgtcagtatcgtaagccggatggctcaggcatcgtgtctctgaaaatcgactggatcatagagcgttaccagctgcctcaaagttaccagcgtatgcctgacttccgccgccgcttcctgcaggtctgtgttaatgagatcaacagcagaactccaatgcgcctctcatacattgagaaaaagaaaggccgccagacgactcatatcgtattttccttccgcgatatcacttccatgacgacaggatagtctgagggttatctgtcacagatttgagggtggttcgtcacatttgttctgacctactgagggtaatttgtcacagttttgctgtttccttcagcctgcatggattttctcatactttttgaactgtaatttttaaggaagccaaatttgagggcagtttgtcacagttgatttccttctctttcccttcgtcatgtgacctgatatcgggggttagttcgtcatcattgatgagggttgattatcacagtttattactctgaattggctatccgcgtgtgtacctctacctggagtttttcccacggtggatatttcttcttgcgctgagcgtaagagctatctgacagaacagttcttctttgcttcctcgccagttcgctcgctatgctcggttacacggctgcggcgagcgctagtgataataagtgactgaggtatgtggtgttcttatctccttttgtagtgttgctcttattttaaacaactttgcggttttttgatgactttgcgattttgttgttgctttgcagtaaattgcaagatttaataaaaaaacgcaaagcaatgattaaaggatgttcagaatgaaactcatggaaacacttaaccagtgcataaacgctggtcatgaaatgacgaaggctatcgccattgcacagtttaatgatgacagcccggaagcgaggaaaataacccggcgctggagaataggtgaagcagcggatttagttggggtttcttctcaggctatcagagatgccgagaaagcagggcgactaccgcacccggatatggaaattcgaggacgggttgagcaacgtgttggttatacaattgaacaaattaatcatatgcgtgatgtgtttggtacgcgattgcgacgtgctgaggacgtatttccaccggtgatcggggttgctgcccataaaggtggcgtttacaaaacctcagtttctgttcatcttgctcaggatctggctctgaaggggctacgtgttttgctcgtggaaggtaacgacccccagggaacagcctcaatgtatcacggatgggtaccagatcttcatattcatgcagaagatactctcctgcctttctatcttggggaaaaggacgatgtcacttatgcaataaagcccacttgctggccggggcttgacattattccttcctgtctggctctgcaccgtattgaaactgagttaatgggcaaatttgatgaaggtaaactgcccaccgatccacacctgatgctccgactggccattgaaactgttgctcatgactatgatgtcatagttattgacagcgcgcctaacctgggtatcggcacgattaatgtcgtatgtgctgctgatgtgctgattgttcccacgcctgctgagttgtttgactacacctccgcactgcagtttttcgatatgcttcgtgatctgctcaagaacgttgatcttaaagggttcgagcctgatgtacgtattttgcttaccaaatacagcaatagtaatggctctcagtccccgtggatggaggagcaaattcgggatgcctggggaagcatggttctaaaaaatgttgtacgtgaaacggatgaagttggtaaaggtcagatccggatgagaactgtttttgaacaggccattgatcaacgcagttcaactggtgcctggagaaatgctctttctatttgggaacctgtctgcaatgaaattttcgatcgtctgattaaaccacgctgggagattagataatgaagcgtgcgcctgttattccaaaacatacgctcaatactcaaccggttgaagatacttcgttatcgacaccagctgccccgatggtggattcgttaattgcgcgcgtaggagtaatggctcgcggtaatgccattactttgcctgtatgtggtcgggatgtgaagtttactcttgaagtgctccggggtgatagtgttgagaaaacctctcgggtatggtcaggtaatgaacgtgaccaggagctgcttactgaggacgcactggatgatctcatcccttcttttctactgactggtcaacagacaccggcgttcggtcgaagagtatctggtgtcatagaaattgccgatgggagtcgccgtcgtaaagctgctgcacttaccgaaagtgattatcgtgttctggttggcgagctggatgatgagcagatggctgcattatccagattgggtaacgattatcgcccaacaagtgcttatgaacgtggtcagcgttatgcaagccgattgcagaatgaatttgctggaaatatttctgcgctggctgatgcggaaaatatttcacgtaagattattacccgctgtatcaacaccgccaaattgcctaaatcagttgttgctcttttttctcaccccggtgaactatctgcccggtcaggtgatgcacttcaaaaagcctttacagataaagaggaattacttaagcagcaggcatctaaccttcatgagcagaaaaaagctggggtgatatttgaagctgaagaagttatcactcttttaacttctgtgcttaaaacgtcatctgcatcaagaactagtttaagctcacgacatcagtttgctcctggagcgacagtattgtataagggcgataaaatggtgcttaacctggacaggtcacgtgttccaactgagtgtatagagaaaattgaggccattcttaaggaacttgaaaagccagcaccctgatgcgaccacgttttagtctacgtttatctgtctttacttaatgtcctttgttacaggccagaaagcataactggcctgaatattctctctgggcccactgttccacttgtatcgtcggtctgataatcagactgggaccacggtcccactcgtatcgtcggtctgattattagtctgggaccacggtcccactcgtatcgtcggtctgattattagtctgggaccacggtcccactcgtatcgtcggtctgataatcagactgggaccacggtcccactcgtatcgtcggtctgattattagtctgggaccatggtcccactcgtatcgtcggtctgattattagtctgggaccacggtcccactcgtatcgtcggtctgattattagtctggaaccacggtcccactcgtatcgtcggtctgattattagtctgggaccacggtcccactcgtatcgtcggtctgattattagtctgggaccacgatcccactcgtgttgtcggtctgattatcggtctgggaccacggtcccacttgtattgtcgatcagactatcagcgtgagactacgattccatcaatgcctgtcaagggcaagtattgacatgtcgtcgtaacctgtagaacggagtaacctcggtgtgcggttgtatgcctgctgtggattgctgctgtgtcctgcttatccacaacattttgcgcacggttatgtggacaaaatacctggttacccaggccgtgccggcacgttaaccgggctgcatccgatgcaagtgtgtcgctgtcgacgcaagcggccgca

SEQ ID NO: 45 - DNA, 7676 bp, Artificial Sequence
  source: /note="Description of Artificial Sequence: Synthetic polynucleotide"
cactctgtgacttggtctcagagctgagaccgtcagaccaagtttactcatatatactttagattgatttaaaacttcatttttaatttaaaaggatctaggtgaagatcctttttgataatctcatgaccaaaatcccttaacgtgagttttcgttccactgagcgtcagaccccgtagaaaagatcaaaggatcttcttgagatcctttttttctgcgcgtaatctgctgcttgcaaacaaaaaaaccaccgctaccagcggtggtttgtttgccggatcaagagctaccaactctttttccgaaggtaactggcttcagcagagcgcagataccaaatactgtccttctagtgtagccgtagttaggccaccacttcaagaactctgtagcaccgcctacatacctcgctctgctaatcctgttaccagtggctgctgccagtggcgataagtcgtgtcttaccgggttggactcaagacgatagttaccggataaggcgcagcggtcgggctgaacggggggttcgtgcacacagcccagcttggagcgaacgacctacaccgaactgagatacctacagcgtgagctatgagaaagcgccacgcttcccgaagggagaaaggcggacaggtatccggtaagcggcagggtcggaacaggagagcgcacgagggagcttccagggggaaacgcctggtatctttatagtcctgtcgggtttcgccacctctgacttgagcgtcgatttttgtgatgctcgtcaggggggcggagcctatggaaaaacgccagcaacgcggcctttttacggttcctggccttttgctggccttttgctcacatgttctttcctgcgttatcccctgattctgtggataaccgtattaccgcctttgagtgagctgataccgctcgccgcagccgaacgaccgagcgcagcgagtcagtgagcgaggaagcggatgagcgcccaatacgcaaaccgcctctccccgcgcgttggccgattcattaatgcagctggcacgacaggtttcccgactggaaagcgggcagtgagcgcaacgcaattaatgtgagttagctcactcattaggcaccccaggctttacactttatgcttccggctcgtatgttgtgtggaattgtgagcggataacaatttcacacaggaaacagctatgaccatgattacgccaagcttgcatgcctgcaggtcgactctagaggatccccgggtaccgagctcgaattcactggccgtcgttttacaacgtcgtgactgggaaaaccctggcgttacccaacttaatcgccttgcagcacatccccctttcgccagctggcgtaatagcgaagaggcccgcaccgatcgcccttcccaacagttgcgcagcctgaatggcgaatggcgcctgatgcggtattttctccttacgcatctgtgcggtatttcacaccgcatatggtgcactctcagtacaatctgctctgatgccgcatagttaagccagccccgacacccgccaacacccgctgacgcgccctgacgggcttgtctgctcccggcatccgcttacagacaagctgtgacggtctcatgtgtgagaccaagtcacgaagtgtgcggccgccttcagcggccgcacgaatccatgtgggagtttattcttgacacagatatttatgatataataactgagtaagcttaacataaggaggaaaaacatatgttacgcagcagcaacgatgttacgcagcagggcagtcgccctaaaacaaagttaggtggctcaagtatgggcatcattcgcacatgtaggctcggccctgaccaagtcaaatccatgcgggctgctcttgatcttttcggtcgtgagttcggagacgtagccacctactcccaacatcagccggactccgattacctcgggaacttgctccgtagtaagacattcatcgcgcttgctgccttcgaccaagaagcggttgttggcgctctcgcggcttacgttctgcccaagtttgagcagccgcgtagtgagatctatatctatgatctcgcagtctccggcgagcaccggaggcagggcattgccaccgcgctcatcaatctcctcaagcatgaggccaacgcgcttggtgcttatgtgatctacgtgcaagcagattacggtgacgatcccgcagtggctctctatacaaagttgggcatacgggaagaagtgatgcactttgatatcgacccaagtaccgccacctaagagctggagcggcgtaaccgtcgcacaggaaggacagagaaagcgcggatctgggaagtgacggacagaacggtcaggacctggattggggaggcggttgccgccgctgctgctgacggtgtgacgttctctgttccggtcacaccacatacgttccgccattcctatgcgatgcacatgctgtatgccggtataccgctgaaagttctgcaaagcctgatgggacataagtccatcagttcaacggaagtctacacgaaggtttttgcgctggatgtggctgcccggctccgggtgcagtttgcgatgccggagtctgatgcggttgcgatgctgaaacaattatcctgagaataaatgccttggcctttatatggaaatgtggaactgagtggatatgctgtttttgtctgttaaacagagaagctggctgttatccactgagaagcgaacgaaacagtcgggaaaatctcccattatcgtagagatccgcattattaatctcaggagcctgtgtagcgtttataggaagtagtgttctgtcatgatgcctgcaagcggtaacgaaaacgatttgaatatgccttcaggaacaatagaaatcttcgtgcggtgttacgttgaagtggagcggattatgtcagcaatggacagaacaacctaatgaacacagaaccatgatgtggtctgtccttttacagccagtagtgctcgccgcagtcgagcgacagggcgaagccctcgagtgagcgaggaagcaccagggaacagcacttatatattctgcttacacacgatgcctgaaaaaacttcccttggggttatccacttatccacggggatatttttataattattttttttatagtttttagatcttcttttttagagcgccttgtaggcctttatccatgctggttctagagaaggtgttgtgacaaattgccctttcagtgtgacaaatcaccctcaaatgacagtcctgtctgtgacaaattgcccttaaccctgtgacaaattgccctcagaagaagctgttttttcacaaagttatccctgcttattgactcttttttatttagtgtgacaatctaaaaacttgtcacacttcacatggatctgtcatggcggaaacagcggttatcaatcacaagaaacgtaaaaatagcccgcgaatcgtccagtcaaacgacctcactgaggcggcatatagtctctcccgggatcaaaaacgtatgctgtatctgttcgttgaccagatcagaaaatctgatggcaccctacaggaacatgacggtatctgcgagatccatgttgctaaatatgctgaaatattcggattgacctctgcggaagccagtaaggatatacggcaggcattgaagagtttcgcggggaaggaagtggttttttatcgccctgaagaggatgccggcgatgaaaaaggctatgaatcttttccttggtttatcaaacgtgcgcacagtccatccagagggctttacagtgtacatatcaacccatatctcattcccttctttatcgggttacagaaccggtttacgcagtttcggcttagtgaaacaaaagaaatcaccaatccgtatgccatgcgtttatacgaatccctgtgtcagtatcgtaagccggatggctcaggcatcgtgtctctgaaaatcgactggatcatagagcgttaccagctgcctcaaagttaccagcgtatgcctgacttccgccgccgcttcctgcaggtctgtgttaatgagatcaacagcagaactccaatgcgcctctcatacattgagaaaaagaaaggccgccagacgactcatatcgtattttccttccgcgatatcacttccatgacgacaggatagtctgagggttatctgtcacagatttgagggtggttcgtcacatttgttctgacctactgagggtaatttgtcacagttttgctgtttccttcagcctgcatggattttctcatactttttgaactgtaatttttaaggaagccaaatttgagggcagtttgtcacagttgatttccttctctttcccttcgtcatgtgacctgatatcgggggttagttcgtcatcattgatgagggttgattatcacagtttattactctgaattggctatccgcgtgtgtacctctacctggagtttttcccacggtggatatttcttcttgcgctgagcgtaagagctatctgacagaacagttcttctttgcttcctcgccagttcgctcgctatgctcggttacacggctgcggcgagcgctagtgataataagtgactgaggtatgtggtgttcttatctccttttgtagtgttgctcttattttaaacaactttgcggttttttgatgactttgcgattttgttgttgctttgcagtaaattgcaagatttaataaaaaaacgcaaagcaatgattaaaggatgttcagaatgaaactcatggaaacacttaaccagtgcataaacgctggtcatgaaatgacgaaggctatcgccattgcacagtttaatgatgacagcccggaagcgaggaaaataacccggcgctggagaataggtgaagcagcggatttagttggggtttcttctcaggctatcagagatgccgagaaagcagggcgactaccgcacccggatatggaaattcgaggacgggttgagcaacgtgttggttatacaattgaacaaattaatcatatgcgtgatgtgtttggtacgcgattgcgacgtgctgaggacgtatttccaccggtgatcggggttgctgcccataaaggtggcgtttacaaaacctcagtttctgttcatcttgctcaggatctggctctgaaggggctacgtgttttgctcgtggaaggtaacgacccccagggaacagcctcaatgtatcacggatgggtaccagatcttcatattcatgcagaagatactctcctgcctttctatcttggggaaaaggacgatgtcacttatgcaataaagcccacttgctggccggggcttgacattattccttcctgtctggctctgcaccgtattgaaactgagttaatgggcaaatttgatgaaggtaaactgcccaccgatccacacctgatgctccgactggccattgaaactgttgctcatgactatgatgtcatagttattgacagcgcgcctaacctgggtatcggcacgattaatgtcgtatgtgctgctgatgtgctgattgttcccacgcctgctgagttgtttgactacacctccgcactgcagtttttcgatatgcttcgtgatctgctcaagaacgttgatcttaaagggttcgagcctgatgtacgtattttgcttaccaaatacagcaatagtaatggctctcagtccccgtggatggaggagcaaattcgggatgcctggggaagcatggttctaaaaaatgttgtacgtgaaacggatgaagttggtaaaggtcagatccggatgagaactgtttttgaacaggccattgatcaacgcagttcaactggtgcctggagaaatgctctttctatttgggaacctgtctgcaatgaaattttcgatcgtctgattaaaccacgctgggagattagataatgaagcgtgcgcctgttattccaaaacatacgctcaatactcaaccggttgaagatacttcgttatcgacaccagctgccccgatggtggattcgttaattgcgcgcgtaggagtaatggctcgcggtaatgccattactttgcctgtatgtggtcgggatgtgaagtttactcttgaagtgctccggggtgatagtgttgagaaaacctctcgggtatggtcaggtaatgaacgtgaccaggagctgcttactgaggacgcactggatgatctcatcccttcttttctactgactggtcaacagacaccggcgttcggtcgaagagtatctggtgtcatagaaattgccgatgggagtcgccgtcgtaaagctgctgcacttaccgaaagtgattatcgtgttctggttggcgagctggatgatgagcagatggctgcattatccagattgggtaacgattatcgcccaacaagtgcttatgaacgtggtcagcgttatgcaagccgattgcagaatgaatttgctggaaatatttctgcgctggctgatgcggaaaatatttcacgtaagattattacccgctgtatcaacaccgccaaattgcctaaatcagttgttgctcttttttctcaccccggtgaactatctgcccggtcaggtgatgcacttcaaaaagcctttacagataaagaggaattacttaagcagcaggcatctaaccttcatgagcagaaaaaagctggggtgatatttgaagctgaagaagttatcactcttttaacttctgtgcttaaaacgtcatctgcatcaagaactagtttaagctcacgacatcagtttgctcctggagcgacagtattgtataagggcgataaaatggtgcttaacctggacaggtcacgtgttccaactgagtgtatagagaaaattgaggccattcttaaggaacttgaaaagccagcaccctgatgcgaccacgttttagtctacgtttatctgtctttacttaatgtcctttgttacaggccagaaagcataactggcctgaatattctctctgggcccactgttccacttgtatcgtcggtctgataatcagactgggaccacggtcccactcgtatcgtcggtctgattattagtctgggaccacggtcccactcgtatcgtcggtctgattattagtctgggaccacggtcccactcgtatcgtcggtctgataatcagactgggaccacggtcccactcgtatcgtcggtctgattattagtctgggaccatggtcccactcgtatcgtcggtctgattattagtctgggaccacggtcccactcgtatcgtcggtctgattattagtctggaaccacggtcccactcgtatcgtcggtctgattattagtctgggaccacggtcccactcgtatcgtcggtctgattattagtctgggaccacgatcccactcgtgttgtcggtctgattatcggtctgggaccacggtcccacttgtattgtcgatcagactatcagcgtgagactacgattccatcaatgcctgtcaagggcaagtattgacatgtcgtcgtaacctgtagaacggagtaacctcggtgtgcggttgtatgcctgctgtggattgctgctgtgtcctgcttatccacaacattttgcgcacggttatgtggacaaaatacctggttacccaggccgtgccggcacgttaaccgggctgcatccgatgcaagtgtgtcgctgtcgacgcaagcggccgca

SEQ ID NO: 46 - DNA, 7676 bp, Artificial Sequence
  source: /note="Description of Artificial Sequence: Synthetic polynucleotide"
cactctgtgacttggtctcatgtgtgagaccgtcagaccaagtttactcatatatactttagattgatttaaaacttcatttttaatttaaaaggatctaggtgaagatcctttttgataatctcatgaccaaaatcccttaacgtgagttttcgttccactgagcgtcagaccccgtagaaaagatcaaaggatcttcttgagatcctttttttctgcgcgtaatctgctgcttgcaaacaaaaaaaccaccgctaccagcggtggtttgtttgccggatcaagagctaccaactctttttccgaaggtaactggcttcagcagagcgcagataccaaatactgtccttctagtgtagccgtagttaggccaccacttcaagaactctgtagcaccgcctacatacctcgctctgctaatcctgttaccagtggctgctgccagtggcgataagtcgtgtcttaccgggttggactcaagacgatagttaccggataaggcgcagcggtcgggctgaacggggggttcgtgcacacagcccagcttggagcgaacgacctacaccgaactgagatacctacagcgtgagctatgagaaagcgccacgcttcccgaagggagaaaggcggacaggtatccggtaagcggcagggtcggaacaggagagcgcacgagggagcttccagggggaaacgcctggtatctttatagtcctgtcgggtttcgccacctctgacttgagcgtcgatttttgtgatgctcgtcaggggggcggagcctatggaaaaacgccagcaacgcggcctttttacggttcctggccttttgctggccttttgctcacatgttctttcctgcgttatcccctgattctgtggataaccgtattaccgcctttgagtgagctgataccgctcgccgcagccgaacgaccgagcgcagcgagtcagtgagcgaggaagcggatgagcgcccaatacgcaaaccgcctctccccgcgcgttggccgattcattaatgcagctggcacgacaggtttcccgactggaaagcgggcagtgagcgcaacgcaattaatgtgagttagctcactcattaggcaccccaggctttacactttatgcttccggctcgtatgttgtgtggaattgtgagcggataacaatttcacacaggaaacagctatgaccatgattacgccaagcttgcatgcctgcaggtcgactctagaggatccccgggtaccgagctcgaattcactggccgtcgttttacaacgtcgtgactgggaaaaccctggcgttacccaacttaatcgccttgcagcacatccccctttcgccagctggcgtaatagcgaagaggcccgcaccgatcgcccttcccaacagttgcgcagcctgaatggcgaatggcgcctgatgcggtattttctccttacgcatctgtgcggtatttcacaccgcatatggtgcactctcagtacaatctgctctgatgccgcatagttaagccagccccgacacccgccaacacccgctgacgcgccctgacgggcttgtctgctcccggcatccgcttacagacaagctgtgacggtctcacagatgagaccaagtcacgaagtgtgcggccgccttcagcggccgcacgaatccatgtgggagtttattcttgacacagatatttatgatataataactgagtaagcttaacataaggaggaaaaacatatgttacgcagcagcaacgatgttacgcagcagggcagtcgccctaaaacaaagttaggtggctcaagtatgggcatcattcgcacatgtaggctcggccctgaccaagtcaaatccatgcgggctgctcttgatcttttcggtcgtgagttcggagacgtagccacctactcccaacatcagccggactccgattacctcgggaacttgctccgtagtaagacattcatcgcgcttgctgccttcgaccaagaagcggttgttggcgctctcgcggcttacgttctgcccaagtttgagcagccgcgtagtgagatctatatctatgatctcgcagtctccggcgagcaccggaggcagggcattgccaccgcgctcatcaatctcctcaagcatgaggccaacgcgcttggtgcttatgtgatctacgtgcaagcagattacggtgacgatcccgcagtggctctctatacaaagttgggcatacgggaagaagtgatgcactttgatatcgacccaagtaccgccacctaagagctggagcggcgtaaccgtcgcacaggaaggacagagaaagcgcggatctgggaagtgacggacagaacggtcaggacctggattggggaggcggttgccgccgctgctgctgacggtgtgacgttctctgttccggtcacaccacatacgttccgccattcctatgcgatgcacatgctgtatgccggtataccgctgaaagttctgcaaagcctgatgggacataagtccatcagttcaacggaagtctacacgaaggtttttgcgctggatgtggctgcccggctccgggtgcagtttgcgatgccggagtctgatgcggttgcgatgctgaaacaattatcctgagaataaatgccttggcctttatatggaaatgtggaactgagtggatatgctgtttttgtctgttaaacagagaagctggctgttatccactgagaagcgaacgaaacagtcgggaaaatctcccattatcgtagagatccgcattattaatctcaggagcctgtgtagcgtttataggaagtagtgttctgtcatgatgcctgcaagcggtaacgaaaacgatttgaatatgccttcaggaacaatagaaatcttcgtgcggtgttacgttgaagtggagcggattatgtcagcaatggacagaacaacctaatgaacacagaaccatgatgtggtctgtccttttacagccagtagtgctcgccgcagtcgagcgacagggcgaagccctcgagtgagcgaggaagcaccagggaacagcacttatatattctgcttacacacgatgcctgaaaaaacttcccttggggttatccacttatccacggggatatttttataattattttttttatagtttttagatcttcttttttagagcgccttgtaggcctttatccatgctggttctagagaaggtgttgtgacaaattgccctttcagtgtgacaaatcaccctcaaatgacagtcctgtctgtgacaaattgcccttaaccctgtgacaaattgccctcagaagaagctgttttttcacaaagttatccctgcttattgactcttttttatttagtgtgacaatctaaaaacttgtcacacttcacatggatctgtcatggcggaaacagcggttatcaatcacaagaaacgtaaaaatagcccgcgaatcgtccagtcaaacgacctcactgaggcggcatatagtctctcccgggatcaaaaacgtatgctgtatctgttcgttgaccagatcagaaaatctgatggcaccctacaggaacatgacggtatctgcgagatccatgttgctaaatatgctgaaatattcggattgacctctgcggaagccagtaaggatatacggcaggcattgaagagtttcgcggggaaggaagtggttttttatcgccctgaagaggatgccggcgatgaaaaaggctatgaatcttttccttggtttatcaaacgtgcgcacagtccatccagagggctttacagtgtacatatcaacccatatctcattcccttctttatcgggttacagaaccggtttacgcagtttcggcttagtgaaacaaaagaaatcaccaatccgtatgccatgcgtttatacgaatccctgtgtcagtatcgtaagccggatggctcaggcatcgtgtctctgaaaatcgactggatcatagagcgttaccagctgcctcaaagttaccagcgtatgcctgacttccgccgccgcttcctgcaggtctgtgttaatgagatcaacagcagaactccaatgcgcctctcatacattgagaaaaagaaaggccgccagacgactcatatcgtattttccttccgcgatatcacttccatgacgacaggatagtctgagggttatctgtcacagatttgagggtggttcgtcacatttgttctgacctactgagggtaatttgtcacagttttgctgtttccttcagcctgcatggattttctcatactttttgaactgtaatttttaaggaagccaaatttgagggcagtttgtcacagttgatttccttctctttcccttcgtcatgtgacctgatatcgggggttagttcgtcatcattgatgagggttgattatcacagtttattactctgaattggctatccgcgtgtgtacctctacctggagtttttcccacggtggatatttcttcttgcgctgagcgtaagagctatctgacagaacagttcttctttgcttcctcgccagttcgctcgctatgctcggttacacggctgcggcgagcgctagtgataataagtgactgaggtatgtggtgttcttatctccttttgtagtgttgctcttattttaaacaactttgcggttttttgatgactttgcgattttgttgttgctttgcagtaaattgcaagatttaataaaaaaacgcaaagcaatgattaaaggatgttcagaatgaaactcatggaaacacttaaccagtgcataaacgctggtcatgaaatgacgaaggctatcgccattgcacagtttaatgatgacagcccggaagcgaggaaaataacccggcgctggagaataggtgaagcagcggatttagttggggtttcttctcaggctatcagagatgccgagaaagcagggcgactaccgcacccggatatggaaattcgaggacgggttgagcaacgtgttggttatacaattgaacaaattaatcatatgcgtgatgtgtttggtacgcgattgcgacgtgctgaggacgtatttccaccggtgatcggggttgctgcccataaaggtggcgtttacaaaacctcagtttctgttcatcttgctcaggatctggctctgaaggggctacgtgttttgctcgtggaaggtaacgacccccagggaacagcctcaatgtatcacggatgggtaccagatcttcatattcatgcagaagatactctcctgcctttctatcttggggaaaaggacgatgtcacttatgcaataaagcccacttgctggccggggcttgacattattccttcctgtctggctctgcaccgtattgaaactgagttaatgggcaaatttgatgaaggtaaactgcccaccgatccacacctgatgctccgactggccattgaaactgttgctcatgactatgatgtcatagttattgacagcgcgcctaacctgggtatcggcacgattaatgtcgtatgtgctgctgatgtgctgattgttcccacgcctgctgagttgtttgactacacctccgcactgcagtttttcgatatgcttcgtgatctgctcaagaacgttgatcttaaagggttcgagcctgatgtacgtattttgcttaccaaatacagcaatagtaatggctctcagtccccgtggatggaggagcaaattcgggatgcctggggaagcatggttctaaaaaatgttgtacgtgaaacggatgaagttggtaaaggtcagatccggatgagaactgtttttgaacaggccattgatcaacgcagttcaactggtgcctggagaaatgctctttctatttgggaacctgtctgcaatgaaattttcgatcgtctgattaaaccacgctgggagattagataatgaagcgtgcgcctgttattccaaaacatacgctcaatactcaaccggttgaagatacttcgttatcgacaccagctgccccgatggtggattcgttaattgcgcgcgtaggagtaatggctcgcggtaatgccattactttgcctgtatgtggtcgggatgtgaagtttactcttgaagtgctccggggtgatagtgttgagaaaacctctcgggtatggtcaggtaatgaacgtgaccaggagctgcttactgaggacgcactggatgatctcatcccttcttttctactgactggtcaacagacaccggcgttcggtcgaagagtatctggtgtcatagaaattgccgatgggagtcgccgtcgtaaagctgctgcacttaccgaaagtgattatcgtgttctggttggcgagctggatgatgagcagatggctgcattatccagattgggtaacgattatcgcccaacaagtgcttatgaacgtggtcagcgttatgcaagccgattgcagaatgaatttgctggaaatatttctgcgctggctgatgcggaaaatatttcacgtaagattattacccgctgtatcaacaccgccaaattgcctaaatcagttgttgctcttttttctcaccccggtgaactatctgcccggtcaggtgatgcacttcaaaaagcctttacagataaagaggaattacttaagcagcaggcatctaaccttcatgagcagaaaaaagctggggtgatatttgaagctgaagaagttatcactcttttaacttctgtgcttaaaacgtcatctgcatcaagaactagtttaagctcacgacatcagtttgctcctggagcgacagtattgtataagggcgataaaatggtgcttaacctggacaggtcacgtgttccaactgagtgtatagagaaaattgaggccattcttaaggaacttgaaaagccagcaccctgatgcgaccacgttttagtctacgtttatctgtctttacttaatgtcctttgttacaggccagaaagcataactggcctgaatattctctctgggcccactgttccacttgtatcgtcggtctgataatcagactgggaccacggtcccactcgtatcgtcggtctgattattagtctgggaccacggtcccactcgtatcgtcggtctgattattagtctgggaccacggtcccactcgtatcgtcggtctgataatcagactgggaccacggtcccactcgtatcgtcggtctgattattagtctgggaccatggtcccactcgtatcgtcggtctgattattagtctgggaccacggtcccactcgtatcgtcggtctgattattagtctggaaccacggtcccactcgtatcgtcggtctgattattagtctgggaccacggtcccactcgtatcgtcggtctgattattagtctgggaccacgatcccactcgtgttgtcggtctgattatcggtctgggaccacggtcccacttgtattgtcgatcagactatcagcgtgagactacgattccatcaatgcctgtcaagggcaagtattgacatgtcgtcgtaacctgtagaacggagtaacctcggtgtgcggttgtatgcctgctgtggattgctgctgtgtcctgcttatccacaacattttgcgcacggttatgtggacaaaatacctggttacccaggccgtgccggcacgttaaccgggctgcatccgatgcaagtgtgtcgctgtcgacgcaagcggccgca

SEQ ID NO: 47 - DNA, 7953 bp, Artificial Sequence
  source: /note="Description of Artificial Sequence: Synthetic polynucleotide"
cactctgtgacttggtctcatgcctgagaccgtcagaccaagtttactcatatatactttagattgatttaaaacttcatttttaatttaaaaggatctaggtgaagatcctttttgataatctcatgaccaaaatcccttaacgtgagttttcgttccactgagcgtcagaccccgtagaaaagatcaaaggatcttcttgagatcctttttttctgcgcgtaatctgctgcttgcaaacaaaaaaaccaccgctaccagcggtggtttgtttgccggatcaagagctaccaactctttttccgaaggtaactggcttcagcagagcgcagataccaaatactgtccttctagtgtagccgtagttaggccaccacttcaagaactctgtagcaccgcctacatacctcgctctgctaatcctgttaccagtggctgctgccagtggcgataagtcgtgtcttaccgggttggactcaagacgatagttaccggataaggcgcagcggtcgggctgaacggggggttcgtgcacacagcccagcttggagcgaacgacctacaccgaactgagatacctacagcgtgagctatgagaaagcgccacgcttcccgaagggagaaaggcggacaggtatccggtaagcggcagggtcggaacaggagagcgcacgagggagcttccagggggaaacgcctggtatctttatagtcctgtcgggtttcgccacctctgacttgagcgtcgatttttgtgatgctcgtcaggggggcggagcctatggaaaaacgccagcaacgcggcctttttacggttcctggccttttgctggccttttgctcacatgttctttcctgcgttatcccctgattctgtggataaccgtattaccgcctttgagtgagctgataccgctcgccgcagccgaacgaccgagcgcagcgagtcagtgagcgaggaagcggatgagcgcccaatacgcaaaccgcctctccccgcgcgttggccgattcattaatgcagctggcacgacaggtttcccgactggaaagcgggcagtgagcgcaacgcaattaatgtgagttagctcactcattaggcaccccaggctttacactttatgcttccggctcgtatgttgtgtggaattgtgagcggataacaatttcacacaggaaacagctatgaccatgattacgccaagcttgcatgcctgcaggtcgactctagaggatccccgggtaccgagctcgaattcactggccgtcgttttacaacgtcgtgactgggaaaaccctggcgttacccaacttaatcgccttgcagcacatccccctttcgccagctggcgtaatagcgaagaggcccgcaccgatcgcccttcccaacagttgcgcagcctgaatggcgaatggcgcctgatgcggtattttctccttacgcatctgtgcggtatttcacaccgcatatggtgcactctcagtacaatctgctctgatgccgcatagttaagccagccccgacacccgccaacacccgctgacgcgccctgacgggcttgtctgctcccggcatccgcttacagacaagctgtgacggtctcacagatgagaccaagtcacgaagtgtgcggccgccttcgtgcgcggaacccctatttgtttatttttctaaatacattcaaatatgtatccgctcatgagacaataaccctgataaatgcttcaataatattgaaaaaggaagagtatggctaaaatgagaatatcaccggaattgaaaaaactgatcgaaaaataccgctgcgtaaaagatacggaaggaatgtctcctgctaaggtatataagctggtgggagaaaatgaaaacctatatttaaaaatgacggacagccggtataaagggaccacctatgatgtggaacgggaaaaggacatgatgctatggctggaaggaaagctgcctgttccaaaggtcctgcactttgaacggcatgatggctggagcaatctgctcatgagtgaggccgatggcgtcctttgctcggaagagtatgaagatgaacaaagccctgaaaagattatcgagctgtatgcggagtgcatcaggctctttcactccatcgacatatcggattgtccctatacgaatagcttagacagccgcttagccgaattggattacttactgaataacgatctggccgatgtggattgcgaaaactgggaagaggacactccatttaaagatccgcgcgagctgtatgattttttaaagacggaaaagcccgaagaggaacttgtcttttcccacggcgacctgggagacagcaacatctttgtgaaagatggcaaagtaagtggctttattgatcttgggagaagcggcagggcggacaagtggtatgacattgccttctgcgtccggtcgctcagggaggatatcggggaagaacagtatgtcgagctattttttgacttactggggatcaagcctgattgggagaaaataaaatattatattttactggatgaattgttttaggagctggagcggcgtaaccgtcgcacaggaaggacagagaaagcgcggatctgggaagtgacggacagaacggtcaggacctggattggggaggcggttgccgccgctgctgctgacggtgtgacgttctctgttccggtcacaccacatacgttccgccattcctatgcgatgcacatgctgtatgccggtataccgctgaaagttctgcaaagcctgatgggacataagtccatcagttcaacggaagtctacacgaaggtttttgcgctggatgtggctgcccggctccgggtgcagtttgcgatgccggagtctgatgcggttgcgatgctgaaacaattatcctgagaataaatgccttggcctttatatggaaatgtggaactgagtggatatgctgtttttgtctgttaaacagagaagctggctgttatccactgagaagcgaacgaaacagtcgggaaaatctcccattatcgtagagatccgcattattaatctcaggagcctgtgtagcgtttataggaagtagtgttctgtcatgatgcctgcaagcggtaacgaaaacgatttgaatatgccttcaggaacaatagaaatcttcgtgcggtgttacgttgaagtggagcggattatgtcagcaatggacagaacaacctaatgaacacagaaccatgatgtggtctgtccttttacagccagtagtgctcgccgcagtcgagcgacagggcgaagccctcgagtgagcgaggaagcaccagggaacagcacttatatattctgcttacacacgatgcctgaaaaaacttcccttggggttatccacttatccacggggatatttttataattattttttttatagtttttagatcttcttttttagagcgccttgtaggcctttatccatgctggttctagagaaggtgttgtgacaaattgccctttcagtgtgacaaatcaccctcaaatgacagtcctgtctgtgacaaattgcccttaaccctgtgacaaattgccctcagaagaagctgttttttcacaaagttatccctgcttattgactcttttttatttagtgtgacaatctaaaaacttgtcacacttcacatggatctgtcatggcggaaacagcggttatcaatcacaagaaacgtaaaaatagcccgcgaatcgtccagtcaaacgacctcactgaggcggcatatagtctctcccgggatcaaaaacgtatgctgtatctgttcgttgaccagatcagaaaatctgatggcaccctacaggaacatgacggtatctgcgagatccatgttgctaaatatgctgaaatattcggattgacctctgcggaagccagtaaggatatacggcaggcattgaagagtttcgcggggaaggaagtggttttttatcgccctgaagaggatgccggcgatgaaaaaggctatgaatcttttccttggtttatcaaacgtgcgcacagtccatccagagggctttacagtgtacatatcaacccatatctcattcccttctttatcgggttacagaaccggtttacgcagtttcggcttagtgaaacaaaagaaatcaccaatccgtatgccatgcgtttatacgaatccctgtgtcagtatcgtaagccggatggctcaggcatcgtgtctctgaaaatcgactggatcatagagcgttaccagctgcctcaaagttaccagcgtatgcctgacttccgccgccgcttcctgcaggtctgtgttaatgagatcaacagcagaactccaatgcgcctctcatacattgagaaaaagaaaggccgccagacgactcatatcgtattttccttccgcgatatcacttccatgacgacaggatagtctgagggttatctgtcacagatttgagggtggttcgtcacatttgttctgacctactgagggtaatttgtcacagttttgctgtttccttcagcctgcatggattttctcatactttttgaactgtaatttttaaggaagccaaatttgagggcagtttgtcacagttgatttccttctctttcccttcgtcatgtgacctgatatcgggggttagttcgtcatcattgatgagggttgattatcacagtttattactctgaattggctatccgcgtgtgtacctctacctggagtttttcccacggtggatatttcttcttgcgctgagcgtaagagctatctgacagaacagttcttctttgcttcctcgccagttcgctcgctatgctcggttacacggctgcggcgagcgctagtgataataagtgactgaggtatgtggtgttcttatctccttttgtagtgttgctcttattttaaacaactttgcggttttttgatgactttgcgattttgttgttgctttgcagtaaattgcaagatttaataaaaaaacgcaaagcaatgattaaaggatgttcagaatgaaactcatggaaacacttaaccagtgcataaacgctggtcatgaaatgacgaaggctatcgccattgcacagtttaatgatgacagcccggaagcgaggaaaataacccggcgctggagaataggtgaagcagcggatttagttggggtttcttctcaggctatcagagatgccgagaaagcagggcgactaccgcacccggatatggaaattcgaggacgggttgagcaacgtgttggttatacaattgaacaaattaatcatatgcgtgatgtgtttggtacgcgattgcgacgtgctgaggacgtatttccaccggtgatcggggttgctgcccataaaggtggcgtttacaaaacctcagtttctgttcatcttgctcaggatctggctctgaaggggctacgtgttttgctcgtggaaggtaacgacccccagggaacagcctcaatgtatcacggatgggtaccagatcttcatattcatgcagaagatactctcctgcctttctatcttggggaaaaggacgatgtcacttatgcaataaagcccacttgctggccggggcttgacattattccttcctgtctggctctgcaccgtattgaaactgagttaatgggcaaatttgatgaaggtaaactgcccaccgatccacacctgatgctccgactggccattgaaactgttgctcatgactatgatgtcatagttattgacagcgcgcctaacctgggtatcggcacgattaatgtcgtatgtgctgctgatgtgctgattgttcccacgcctgctgagttgtttgactacacctccgcactgcagtttttcgatatgcttcgtgatctgctcaagaacgttgatcttaaagggttcgagcctgatgtacgtattttgcttaccaaatacagcaatagtaatggctctcagtccccgtggatggaggagcaaattcgggatgcctggggaagcatggttctaaaaaatgttgtacgtgaaacggatgaagttggtaaaggtcagatccggatgagaactgtttttgaacaggccattgatcaacgcagttcaactggtgcctggagaaatgctctttctatttgggaacctgtctgcaatgaaattttcgatcgtctgattaaaccacgctgggagattagataatgaagcgtgcgcctgttattccaaaacatacgctcaatactcaaccggttgaagatacttcgttatcgacaccagctgccccgatggtggattcgttaattgcgcgcgtaggagtaatggctcgcggtaatgccattactttgcctgtatgtggtcgggatgtgaagtttactcttgaagtgctccggggtgatagtgttgagaaaacctctcgggtatggtcaggtaatgaacgtgaccaggagctgcttactgaggacgcactggatgatctcatcccttcttttctactgactggtcaacagacaccggcgttcggtcgaagagtatctggtgtcatagaaattgccgatgggagtcgccgtcgtaaagctgctgcacttaccgaaagtgattatcgtgttctggttggcgagctggatgatgagcagatggctgcattatccagattgggtaacgattatcgcccaacaagtgcttatgaacgtggtcagcgttatgcaagccgattgcagaatgaatttgctggaaatatttctgcgctggctgatgcggaaaatatttcacgtaagattattacccgctgtatcaacaccgccaaattgcctaaatcagttgttgctcttttttctcaccccggtgaactatctgcccggtcaggtgatgcacttcaaaaagcctttacagataaagaggaattacttaagcagcaggcatctaaccttcatgagcagaaaaaagctggggtgatatttgaagctgaagaagttatcactcttttaacttctgtgcttaaaacgtcatctgcatcaagaactagtttaagctcacgacatcagtttgctcctggagcgacagtattgtataagggcgataaaatggtgcttaacctggacaggtcacgtgttccaactgagtgtatagagaaaattgaggccattcttaaggaacttgaaaagccagcaccctgatgcgaccacgttttagtctacgtttatctgtctttacttaatgtcctttgttacaggccagaaagcataactggcctgaatattctctctgggcccactgttccacttgtatcgtcggtctgataatcagactgggaccacggtcccactcgtatcgtcggtctgattattagtctgggaccacggtcccactcgtatcgtcggtctgattattagtctgggaccacggtcccactcgtatcgtcggtctgataatcagactgggaccacggtcccactcgtatcgtcggtctgattattagtctgggaccatggtcccactcgtatcgtcggtctgattattagtctgggaccacggtcccactcgtatcgtcggtctgattattagtctggaaccacggtcccactcgtatcgtcggtctgattattagtctgggaccacggtcccactcgtatcgtcggtctgattattagtctgggaccacgatcccactcgtgttgtcggtctgattatcggtctgggaccacggtcccacttgtattgtcgatcagactatcagcgtgagactacgattccatcaatgcctgtcaagggcaagtattgacatgtcgtcgtaacctgtagaacggagtaacctcggtgtgcggttgtatgcctgctgtggattgctgctgtgtcctgcttatccacaacattttgcgcacggttatgtggacaaaatacctggttacccaggccgtgccggcacgttaaccgggctgcatccgatgcaagtgtgtcgctgtcgacgcaagcggccgca

SEQ ID NO: 48 - DNA, 12 bp, Artificial Sequence
  source: /note="Description of Artificial Sequence: Synthetic oligonucleotide"
  modified_base (9)..(12): a, c, t, g, unknown or other
gaagacgcnnnn

SEQ ID NO: 49 - DNA, 20 bp, Artificial Sequence
  source: /note="Description of Artificial Sequence: Synthetic oligonucleotide"
tacccacgtgattcacgctg

SEQ ID NO: 50 - DNA, 20 bp, Artificial Sequence
  source: /note="Description of Artificial Sequence: Synthetic oligonucleotide"
atcctacagactcgctgtgg

SEQ ID NO: 51 - DNA, 11 bp, Artificial Sequence
  source: /note="Description of Artificial Sequence: Synthetic oligonucleotide"
  modified_base (4)..(5): a, c, t, g, unknown or other
gacnnggtctc

SEQ ID NO: 52 - DNA, 10 bp, Artificial Sequence
  source: /note="Description of Artificial Sequence: Synthetic oligonucleotide"
gaagctcttc

SEQ ID NO: 53 - DNA, 11 bp, Artificial Sequence
  source: /note="Description of Artificial Sequence: Synthetic oligonucleotide"
  modified_base (8)..(11): a, c, t, g, unknown or other
gctcttcnnnn

SEQ ID NO: 54 - DNA, 10 bp, Artificial Sequence
  source: /note="Description of Artificial Sequence: Synthetic oligonucleotide"
  modified_base (7)..(10): a, c, t, g, unknown or other
ctcttcnnnn

SEQ ID NO: 55 - DNA, 10 bp, Artificial Sequence
  source: /note="Description of Artificial Sequence: Synthetic oligonucleotide"
  modified_base (9)..(10): a, c, t, g, unknown or other
ctcttcgann

SEQ ID NO: 56 - DNA, 14 bp, Artificial Sequence
  source: /note="Description of Artificial Sequence: Synthetic oligonucleotide"
  modified_base (4)..(9): a, c, t, g, unknown or other
gacnnnnnnrtaay

SEQ ID NO: 57 - DNA, 14 bp, Artificial Sequence
  source: /note="Description of Artificial Sequence: Synthetic oligonucleotide"
  modified_base (6)..(11): a, c, t, g, unknown or other
rttaynnnnnngtc

SEQ ID NO: 58 - DNA, 16 bp, Artificial Sequence
  source: /note="Description of Artificial Sequence: Synthetic oligonucleotide"
  modified_base (6)..(10): a, c, t, g, unknown or other
rttaynnnnnggtctc

SEQ ID NO: 59 - DNA, 15 bp, Artificial Sequence
  source: /note="Description of Artificial Sequence: Synthetic oligonucleotide"
  modified_base (4)..(12): a, c, t, g, unknown or other
ccannnnnnnnntgg

SEQ ID NO: 60 - DNA, 15 bp, Artificial Sequence
  source: /note="Description of Artificial Sequence: Synthetic oligonucleotide"
  modified_base (4)..(12): a, c, t, g, unknown or other
ccannnnnnnnntgg

SEQ ID NO: 61 - DNA, 15 bp, Artificial Sequence
  source: /note="Description of Artificial Sequence: Synthetic oligonucleotide"
  modified_base (4)..(12): a, c, t, g, unknown or other
ccannnnnnnnntgg

SEQ ID NO: 62 - DNA, 12 bp, Artificial Sequence
  source: /note="Description of Artificial Sequence: Synthetic oligonucleotide"
  modified_base (4)..(9): a, c, t, g, unknown or other
ccannnnnntgg

SEQ ID NO: 63 - DNA, 12 bp, Artificial Sequence
  source: /note="Description of Artificial Sequence: Synthetic oligonucleotide"
  modified_base (4)..(9): a, c, t, g, unknown or other
ccannnnnntgg

SEQ ID NO: 64 - DNA, 12 bp, Artificial Sequence
  source: /note="Description of Artificial Sequence: Synthetic oligonucleotide"
  modified_base (4)..(9): a, c, t, g, unknown or other
ccannnnnntgg

SEQ ID NO: 65 - DNA, 12 bp, Artificial Sequence
  source: /note="Description of Artificial Sequence: Synthetic oligonucleotide"
  modified_base (4)..(9): a, c, t, g, unknown or other
ccannnnnntgg

SEQ ID NO: 66 - DNA, 12 bp, Artificial Sequence
  source: /note="Description of Artificial Sequence: Synthetic oligonucleotide"
  modified_base (4)..(9): a, c, t, g, unknown or other
ccannnnnntgg

SEQ ID NO: 67 - DNA, 12 bp, Artificial Sequence
  source: /note="Description of Artificial Sequence: Synthetic oligonucleotide"
  modified_base (4)..(9): a, c, t, g, unknown or other
ccannnnnntgg

SEQ ID NO: 68 - DNA, 12 bp, Artificial Sequence
  source: /note="Description of Artificial Sequence: Synthetic oligonucleotide"
  modified_base (4)..(9): a, c, t, g, unknown or other
ccannnnnntgg

SEQ ID NO: 69 - DNA, 11 bp, Artificial Sequence
  source: /note="Description of Artificial Sequence: Synthetic oligonucleotide"
  modified_base (4)..(8): a, c, t, g, unknown or other
gacnnnnngtc

SEQ ID NO: 70 - DNA, 11 bp, Artificial Sequence
  source: /note="Description of Artificial Sequence: Synthetic oligonucleotide"
  modified_base (4)..(8): a, c, t, g, unknown or other
gccnnnnnggc

SEQ ID NO: 71 - DNA, 11 bp, Artificial Sequence
  source: /note="Description of Artificial Sequence: Synthetic oligonucleotide"
  modified_base (4)..(8): a, c, t, g, unknown or other
gccnnnnnggc

SEQ ID NO: 72 - DNA, 11 bp, Artificial Sequence
  source: /note="Description of Artificial Sequence: Synthetic oligonucleotide"
  modified_base (4)..(8): a, c, t, g, unknown or other
gacnnnnngtc

SEQ ID NO: 73 - DNA, 11 bp, Artificial Sequence
  source: /note="Description of Artificial Sequence: Synthetic oligonucleotide"
  modified_base (4)..(8): a, c, t, g, unknown or other
cctnnnnnagg

SEQ ID NO: 74 - DNA, 11 bp, Artificial Sequence
  source: /note="Description of Artificial Sequence: Synthetic oligonucleotide"
  modified_base (4)..(8): a, c, t, g, unknown or other
cctnnnnnagg

SEQ ID NO: 75 - DNA, 11 bp, Artificial Sequence
  source: /note="Description of Artificial Sequence: Synthetic oligonucleotide"
  modified_base (4)..(8): a, c, t, g, unknown or other
ccannnnntgg

SEQ ID NO: 76 - DNA, 11 bp, Artificial Sequence
  source: /note="Description of Artificial Sequence: Synthetic oligonucleotide"
  modified_base (4)..(8): a, c, t, g, unknown or other
cctnnnnnagg

SEQ ID NO: 77 - DNA, 11 bp, Artificial Sequence
  source: /note="Description of Artificial Sequence: Synthetic oligonucleotide"
  modified_base (4)..(8): a, c, t, g, unknown or other
ccannnnntgg

SEQ ID NO: 78 - DNA, 11 bp, Artificial Sequence
  source: /note="Description of Artificial Sequence: Synthetic oligonucleotide"
  modified_base (4)..(8): a, c, t, g, unknown or other
gacnnnnngtc

SEQ ID NO: 79 - DNA, 11 bp, Artificial Sequence
  source: /note="Description of Artificial Sequence: Synthetic oligonucleotide"
  modified_base (4)..(8): a, c, t, g, unknown or other
ccannnnntgg

SEQ ID NO: 80 - DNA, 11 bp, Artificial Sequence
  source: /note="Description of Artificial Sequence: Synthetic oligonucleotide"
  modified_base (4)..(8): a, c, t, g, unknown or other
ccannnnntgg

SEQ ID NO: 81 - DNA, 11 bp, Artificial Sequence
  source: /note="Description of Artificial Sequence: Synthetic oligonucleotide"
  modified_base (4)..(8): a, c, t, g, unknown or other
gacnnnnngtc

SEQ ID NO: 82 - DNA, 11 bp, Artificial Sequence
  source: /note="Description of Artificial Sequence: Synthetic oligonucleotide"
  modified_base (4)..(8): a, c, t, g, unknown or other
cctnnnnnagg

SEQ ID NO: 83 - DNA, 11 bp, Artificial Sequence
  source: /note="Description of Artificial Sequence: Synthetic oligonucleotide"
  modified_base (4)..(8): a, c, t, g, unknown or other
gacnnnnngtc

SEQ ID NO: 84 - DNA, 11 bp, Artificial Sequence
  source: /note="Description of Artificial Sequence: Synthetic oligonucleotide"
  modified_base (4)..(8): a, c, t, g, unknown or other
gccnnnnnggc

SEQ ID NO: 85 - DNA, 11 bp, Artificial Sequence
  source: /note="Description of Artificial Sequence: Synthetic oligonucleotide"
  modified_base (4)..(8): a, c, t, g, unknown or other
ccannnnntgg

SEQ ID NO: 86 - DNA, 11 bp, Artificial Sequence
  source: /note="Description of Artificial Sequence: Synthetic oligonucleotide"
  modified_base (4)..(8): a, c, t, g, unknown or other
gccnnnnnggc

SEQ ID NO: 87 - DNA, 11 bp, Artificial Sequence
  source: /note="Description of Artificial Sequence: Synthetic oligonucleotide"
  modified_base (4)..(8): a, c, t, g, unknown or other
ccannnnntgg

SEQ ID NO: 88 - DNA, 11 bp, Artificial Sequence
  source: /note="Description of Artificial Sequence: Synthetic oligonucleotide"
  modified_base (4)..(8): a, c, t, g, unknown or other
ccannnnntgg

SEQ ID NO: 89 - DNA, 11 bp, Artificial Sequence
  source: /note="Description of Artificial Sequence: Synthetic oligonucleotide"
  modified_base (4)..(8): a, c, t, g, unknown or other
gccnnnnnggc

SEQ ID NO: 90 - DNA, 10 bp, Artificial Sequence
  source: /note="Description of Artificial Sequence: Synthetic oligonucleotide"
  modified_base (4)..(7): a, c, t, g, unknown or other
gcannnngtc

SEQ ID NO: 91 - DNA, 10 bp, Artificial Sequence
  source: /note="Description of Artificial Sequence: Synthetic oligonucleotide"
  modified_base (4)..(7): a, c, t, g, unknown or other
gcannnngtc

SEQ ID NO: 92 - DNA, 10 bp, Artificial Sequence
  source: /note="Description of Artificial Sequence: Synthetic oligonucleotide"
  modified_base (4)..(7): a, c, t, g, unknown or other
gcannnngtc

SEQ ID NO: 93 - DNA, 10 bp, Artificial Sequence
  source: /note="Description of Artificial Sequence: Synthetic oligonucleotide"
  modified_base (4)..(7): a, c, t, g, unknown or other
gacnnnntgc

SEQ ID NO: 94 - DNA, 10 bp, Artificial Sequence
  source: /note="Description of Artificial Sequence: Synthetic oligonucleotide"
  modified_base (4)..(7): a, c, t, g, unknown or other
gacnnnntgc

SEQ ID NO: 95 - DNA, 10 bp, Artificial Sequence
  source: /note="Description of Artificial Sequence: Synthetic oligonucleotide"
  modified_base (4)..(7): a, c, t, g, unknown or other
gacnnnntgc

SEQ ID NO: 96 - DNA, 10 bp, Artificial Sequence
  source: /note="Description of Artificial Sequence: Synthetic oligonucleotide"
  modified_base (4)..(7): a, c, t, g, unknown or other
gacnnnntgc

SEQ ID NO: 97 - DNA, 10 bp, Artificial Sequence
  source: /note="Description of Artificial Sequence: Synthetic oligonucleotide"
  modified_base (4)..(7): a, c, t, g, unknown or other
gacnnnntgc

SEQ ID NO: 98 - DNA, 10 bp, Artificial Sequence
  source: /note="Description of Artificial Sequence: Synthetic oligonucleotide"
  modified_base (4)..(7): a, c, t, g, unknown or other
gcannnngtc

SEQ ID NO: 99 - DNA, 10 bp, Artificial Sequence
  source: /note="Description of Artificial Sequence: Synthetic oligonucleotide"
  modified_base (4)..(7): a, c, t, g, unknown or other
gacnnnntgc

SEQ ID NO: 100 - DNA, 10 bp, Artificial Sequence
  source: /note="Description of Artificial Sequence: Synthetic oligonucleotide"
  modified_base (4)..(7): a, c, t, g, unknown or other
gaannnnttc

SEQ ID NO: 101 - DNA, 10 bp, Artificial Sequence
  source: /note="Description of Artificial Sequence: Synthetic oligonucleotide"
  modified_base (4)..(7): a, c, t, g, unknown or other
gaannnnttc

SEQ ID NO: 102 - DNA, 10 bp, Artificial Sequence
  source: /note="Description of Artificial Sequence: Synthetic oligonucleotide"
  modified_base (4)..(7): a, c, t, g, unknown or other
gcannnngtc

SEQ ID NO: 103 - DNA, 10 bp, Artificial Sequence
  source: /note="Description of Artificial Sequence: Synthetic oligonucleotide"
  modified_base (4)..(7): a, c, t, g, unknown or other
gcannnngtc

SEQ ID NO: 104 - DNA, 10 bp, Artificial Sequence
  source: /note="Description of Artificial Sequence: Synthetic oligonucleotide"
  modified_base (4)..(7): a, c, t, g, unknown or other
gacnnnntgc

SEQ ID NO: 105 - DNA, 10 bp, Artificial Sequence
  source: /note="Description of Artificial Sequence: Synthetic oligonucleotide"
  modified_base (4)..(7): a, c, t, g, unknown or other
gacnnnntgc

SEQ ID NO: 106 - DNA, 10 bp, Artificial Sequence
  source: /note="Description of Artificial Sequence: Synthetic oligonucleotide"
  modified_base (4)..(7): a, c, t, g, unknown or other
gaannnnttc

SEQ ID NO: 107 - DNA, 12 bp, Artificial Sequence
  source: /note="Description of Artificial Sequence: Synthetic oligonucleotide"
  modified_base (6)..(12): a, c, t, g, unknown or other
cccgcnnnnnnn

SEQ ID NO: 108 - DNA, 12 bp, Artificial Sequence
  source: /note="Description of Artificial Sequence: Synthetic oligonucleotide"
  modified_base (9)..(12): a, c, t, g, unknown or other
cccggccgnnnn

SEQ ID NO: 109 - DNA, 15 bp, Artificial Sequence
  source: /note="Description of Artificial Sequence: Synthetic oligonucleotide"
  modified_base (8)..(15): a, c, t, g, unknown or other
gggcccgnnnnnnnn

SEQ ID NO: 110 - DNA, 12 bp, Artificial Sequence
  source: /note="Description of Artificial Sequence: Synthetic oligonucleotide"
  modified_base (7)..(12): a, c, t, g, unknown or other
cccgrgnnnnnn

SEQ ID NO: 111 - DNA, 16 bp, Artificial Sequence
  source: /note="Description of Artificial Sequence: Synthetic oligonucleotide"
  modified_base (9)..(16): a, c, t, g, unknown or other
rgatcccgnnnnnnnn

SEQ ID NO: 112 - DNA, 14 bp, Artificial Sequence
  source: /note="Description of Artificial Sequence: Synthetic oligonucleotide"
  modified_base (7)..(14): a, c, t, g, unknown or other
ggcccgnnnnnnnn

SEQ ID NO: 113 - DNA, 15 bp, Artificial Sequence
  source: /note="Description of Artificial Sequence: Synthetic oligonucleotide"
  modified_base (8)..(15): a, c, t, g, unknown or other
gatcccgnnnnnnnn

SEQ ID NO: 114 - DNA, 12 bp, Artificial Sequence
  source: /note="Description of Artificial Sequence: Synthetic oligonucleotide"
  modified_base (8)..(12): a, c, t, g, unknown or other
cccgatcnnnnn

SEQ ID NO: 115 - DNA, 16 bp, Artificial Sequence
  source: /note="Description of Artificial Sequence: Synthetic oligonucleotide"
  modified_base (9)..(16): a, c, t, g, unknown or other
ggatcccgnnnnnnnn

SEQ ID NO: 116 - DNA, 15 bp, Artificial Sequence
  source: /note="Description of Artificial Sequence: Synthetic oligonucleotide"
  modified_base (8)..(15): a, c, t, g, unknown or other
grgcccgnnnnnnnn

SEQ ID NO: 117 - DNA, 15 bp, Artificial Sequence
  source: /note="Description of Artificial Sequence: Synthetic oligonucleotide"
  modified_base (8)..(15): a, c, t, g, unknown or other
ggwcccgnnnnnnnn

SEQ ID NO: 118 - DNA, 16 bp, Artificial Sequence
  source: /note="Description of Artificial Sequence: Synthetic oligonucleotide"
  modified_base (9)..(16): a, c, t, g, unknown or other
ggwccccgnnnnnnnn

SEQ ID NO: 119 - DNA, 15 bp, Artificial Sequence
  source: /note="Description of Artificial Sequence: Synthetic oligonucleotide"
  modified_base (8)..(15): a, c, t, g, unknown or other
ggwcccgnnnnnnnn

SEQ ID NO: 120 - DNA, 12 bp, Artificial Sequence
  source: /note="Description of Artificial Sequence: Synthetic oligonucleotide"
  modified_base (9)..(12): a, c, t, g, unknown or other
cccggwccnnnn

SEQ ID NO: 121 - DNA, 12 bp, Artificial Sequence
  source: /note="Description of Artificial Sequence: Synthetic oligonucleotide"
  modified_base (7)..(12): a, c, t, g, unknown or other
cccgcgnnnnnn

SEQ ID NO: 122 - DNA, 12 bp, Artificial Sequence
  source: /note="Description of Artificial Sequence: Synthetic oligonucleotide"
  modified_base (9)..(12): a, c, t, g, unknown or other
cccgtacgnnnn

SEQ ID NO: 123 - DNA, 14 bp, Artificial Sequence
  source: /note="Description of Artificial Sequence: Synthetic oligonucleotide"
  modified_base (7)..(14): a, c, t, g, unknown or other
ggcccgnnnnnnnn

SEQ ID NO: 124 - DNA, 12 bp, Artificial Sequence
  source: /note="Description of Artificial Sequence: Synthetic oligonucleotide"
  modified_base (7)..(12): a, c, t, g, unknown or other
cccgrgnnnnnn

SEQ ID NO: 125 - DNA, 15 bp, Artificial Sequence
  source: /note="Description of Artificial Sequence: Synthetic oligonucleotide"
  modified_base (8)..(15): a, c, t, g, unknown or other
gatcccgnnnnnnnn

SEQ ID NO: 126 - DNA, 12 bp, Artificial Sequence
  source: /note="Description of Artificial Sequence: Synthetic oligonucleotide"
  modified_base (8)..(12): a, c, t, g, unknown or other
cccgatcnnnnn

SEQ ID NO: 127 - DNA, 12 bp, Artificial Sequence
  source: /note="Description of Artificial Sequence: Synthetic oligonucleotide"
  modified_base (6)..(12): a, c, t, g, unknown or other
cccggnnnnnnn

SEQ ID NO: 128 - DNA, 13 bp, Artificial Sequence
  source: /note="Description of Artificial Sequence: Synthetic oligonucleotide"
  modified_base (7)..(13): a, c, t, g, unknown or other
gcccgcnnnnnnn

SEQ ID NO: 129 - DNA, 13 bp, Artificial Sequence
  source: /note="Description of Artificial Sequence: Synthetic oligonucleotide"
  modified_base (7)..(13): a, c, t, g, unknown or other
ccccggnnnnnnn

SEQ ID NO: 130 - DNA, 12 bp, Artificial Sequence
  source: /note="Description of Artificial Sequence: Synthetic oligonucleotide"
  modified_base (7)..(12): a, c, t, g, unknown or other
cccgggnnnnnn

SEQ ID NO: 131 - DNA, 12 bp, Artificial Sequence
  source: /note="Description of Artificial Sequence: Synthetic oligonucleotide"
  modified_base (8)..(12): a, c, t, g, unknown or other
cccgsggnnnnn

SEQ ID NO: 132 - DNA, 12 bp, Artificial Sequence
  source: /note="Description of Artificial Sequence: Synthetic oligonucleotide"
  modified_base (7)..(12): a, c, t, g, unknown or other
cccgggnnnnnn

SEQ ID NO: 133 - DNA, 16 bp, Artificial Sequence
  source: /note="Description of Artificial Sequence: Synthetic oligonucleotide"
  modified_base (3)..(3): a, c, t, g, unknown or other
  modified_base (9)..(16): a, c, t, g, unknown or other
ggnccccgnnnnnnnn

SEQ ID NO: 134 - DNA, 15 bp, Artificial Sequence
  source: /note="Description of Artificial Sequence: Synthetic oligonucleotide"
  modified_base (3)..(3): a, c, t, g, unknown or other
  modified_base (8)..(15): a, c, t, g, unknown or other
ggncccgnnnnnnnn

SEQ ID NO: 135 - DNA, 14 bp, Artificial Sequence
  source: /note="Description of Artificial Sequence: Synthetic oligonucleotide"
  modified_base (7)..(14): a, c, t, g, unknown or other
ggcccgnnnnnnnn

SEQ ID NO: 136 - DNA, 12 bp, Artificial Sequence
  source: /note="Description of Artificial Sequence: Synthetic oligonucleotide"
  modified_base (6)..(6): a, c, t, g, unknown or other
  modified_base (9)..(12): a, c, t, g, unknown or other
cccggnccnnnn

SEQ ID NO: 137 - DNA, 12 bp, Artificial Sequence
  source: /note="Description of Artificial Sequence: Synthetic oligonucleotide"
  modified_base (7)..(12): a, c, t, g, unknown or other
cccgcynnnnnn

SEQ ID NO: 138 - DNA, 14 bp, Artificial Sequence
  source: /note="Description of Artificial Sequence: Synthetic oligonucleotide"
  modified_base (7)..(14): a, c, t, g, unknown or other
vgcccgnnnnnnnn

SEQ ID NO: 139 - DNA, 15 bp, Artificial Sequence
  source: /note="Description of Artificial Sequence: Synthetic oligonucleotide"
  modified_base (8)..(15): a, c, t, g, unknown or other
gtacccgnnnnnnnn

SEQ ID NO: 140 - DNA, 12 bp, Artificial Sequence
  source: /note="Description of Artificial Sequence: Synthetic oligonucleotide"
  modified_base (8)..(12): a, c, t, g, unknown or other
cccgtacnnnnn

SEQ ID NO: 141 - DNA, 14 bp, Artificial Sequence
  source: /note="Description of Artificial Sequence: Synthetic oligonucleotide"
  modified_base (7)..(14): a, c, t, g, unknown or other
ggcccgnnnnnnnn

SEQ ID NO: 142 - DNA, 12 bp, Artificial Sequence
  source: /note="Description of Artificial Sequence: Synthetic oligonucleotide"
  modified_base (6)..(12): a, c, t, g, unknown or other
cccggnnnnnnn

SEQ ID NO: 143 - DNA, 12 bp, Artificial Sequence
  source: /note="Description of Artificial Sequence: Synthetic oligonucleotide"
  modified_base (8)..(12): a, c, t, g, unknown or other
cccgcggnnnnn

SEQ ID NO: 144 - DNA, 16 bp, Artificial Sequence
  source: /note="Description of Artificial Sequence: Synthetic oligonucleotide"
  modified_base (4)..(4): a, c, t, g, unknown or other
  modified_base (9)..(16): a, c, t, g, unknown or other
rggncccgnnnnnnnn

SEQ ID NO: 145 - DNA, 12 bp, Artificial Sequence
  source: /note="Description of Artificial Sequence: Synthetic oligonucleotide"
  modified_base (6)..(12): a, c, t, g, unknown or other
cccggnnnnnnn

SEQ ID NO: 146 - DNA, 12 bp, Artificial Sequence
  source: /note="Description of Artificial Sequence: Synthetic oligonucleotide"
  modified_base (7)..(12): a, c, t, g, unknown or other
cccgcgnnnnnn

SEQ ID NO: 147 - DNA, 12 bp, Artificial Sequence
  source: /note="Description of Artificial Sequence: Synthetic oligonucleotide"
  modified_base (6)..(12): a, c, t, g, unknown or other
cccggnnnnnnn

SEQ ID NO: 148 - DNA, 12 bp, Artificial Sequence
  source: /note="Description of Artificial Sequence: Synthetic oligonucleotide"
  modified_base (6)..(12): a, c, t, g, unknown or other
cccggnnnnnnn

SEQ ID NO: 149 - DNA, 16 bp, Artificial Sequence
  source: /note="Description of Artificial Sequence: Synthetic oligonucleotide"
  modified_base (9)..(16): a, c, t, g, unknown or other
ggyrcccgnnnnnnnn

SEQ ID NO: 150 - DNA, 12 bp, Artificial Sequence
  source: /note="Description of Artificial Sequence: Synthetic oligonucleotide"
  modified_base (8)..(12): a, c, t, g, unknown or other
cccgwcgnnnnn

SEQ ID NO: 151 - DNA, 12 bp, Artificial Sequence
  source: /note="Description of Artificial Sequence: Synthetic oligonucleotide"
  modified_base (7)..(12): a, c, t, g, unknown or other
cccgggnnnnnn

SEQ ID NO: 152 - DNA, 12 bp, Artificial Sequence
  source: /note="Description of Artificial Sequence: Synthetic oligonucleotide"
  modified_base (5)..(5): a, c, t, g, unknown or other
  modified_base (8)..(12): a, c, t, g, unknown or other
cccgnggnnnnn

SEQ ID NO: 153 - DNA, 15 bp, Artificial Sequence
  source: /note="Description of Artificial Sequence: Synthetic oligonucleotide"
  modified_base (3)..(3): a, c, t, g, unknown or other
  modified_base (8)..(15): a, c, t, g, unknown or other
ggncccgnnnnnnnn

SEQ ID NO: 154 - DNA, 14 bp, Artificial Sequence
  source: /note="Description of Artificial Sequence: Synthetic oligonucleotide"
  modified_base (7)..(14): a, c, t, g, unknown or other
ggcccgnnnnnnnn

SEQ ID NO: 155 - DNA, 16 bp, Artificial Sequence
  source: /note="Description of Artificial Sequence: Synthetic oligonucleotide"
  modified_base (3)..(3): a, c, t, g, unknown or other
  modified_base (9)..(16): a, c, t, g, unknown or other
ggnccccgnnnnnnnn

SEQ ID NO: 156 - DNA, 15 bp, Artificial Sequence
  source: /note="Description of Artificial Sequence: Synthetic oligonucleotide"
  modified_base (3)..(3): a, c, t, g, unknown or other
  modified_base (8)..(15): a, c, t, g, unknown or other
ggncccgnnnnnnnn

SEQ ID NO: 157 - DNA, 14 bp, Artificial Sequence
  source: /note="Description of Artificial Sequence: Synthetic oligonucleotide"
  modified_base (7)..(14): a, c, t, g, unknown or other
ggcccgnnnnnnnn

SEQ ID NO: 158 - DNA, 12 bp, Artificial Sequence
  source: /note="Description of Artificial Sequence: Synthetic oligonucleotide"
  modified_base (6)..(6): a, c, t, g, unknown or other
  modified_base (9)..(12): a, c, t, g, unknown or other
cccggnccnnnn

SEQ ID NO: 159 - DNA, 14 bp, Artificial Sequence
  source: /note="Description of Artificial Sequence: Synthetic oligonucleotide"
  modified_base (7)..(14): a, c, t, g, unknown or other
rgcccgnnnnnnnn

SEQ ID NO: 160 - DNA, 16 bp, Artificial Sequence
  source: /note="Description of Artificial Sequence: Synthetic oligonucleotide"
  modified_base (3)..(4): a, c, t, g, unknown or other
  modified_base (9)..(16): a, c, t, g, unknown or other
ggnncccgnnnnnnnn

SEQ ID NO: 161 - DNA, 15 bp, Artificial Sequence
  source: /note="Description of Artificial Sequence: Synthetic oligonucleotide"
  modified_base (3)..(3): a, c, t, g, unknown or other
  modified_base (8)..(15): a, c, t, g, unknown or other
ggncccgnnnnnnnn

SEQ ID NO: 162 - DNA, 17 bp, Artificial Sequence
  source: /note="Description of Artificial Sequence: Synthetic oligonucleotide"
  modified_base (10)..(17): a, c, t, g, unknown or other
gctagcccgnnnnnnnn

SEQ ID NO: 163 - DNA, 12 bp, Artificial Sequence
  source: /note="Description of Artificial Sequence: Synthetic oligonucleotide"
  modified_base (7)..(12): a, c, t, g, unknown or other
cccggynnnnnn

SEQ ID NO: 164 - DNA, 12 bp, Artificial Sequence
  source: /note="Description of Artificial Sequence: Synthetic oligonucleotide"
  modified_base (9)..(12): a, c, t, g, unknown or other
cccgatcgnnnn

SEQ ID NO: 165 - DNA, 14 bp, Artificial Sequence
  source: /note="Description of Artificial Sequence: Synthetic oligonucleotide"
  modified_base (7)..(14): a, c, t, g, unknown or other
cccccgnnnnnnnn

SEQ ID NO: 166 - DNA, 13 bp, Artificial Sequence
  source: /note="Description of Artificial Sequence: Synthetic oligonucleotide"
  modified_base (8)..(13): a, c, t, g, unknown or other
gcccgccnnnnnn

SEQ ID NO: 167 - DNA, 16 bp, Artificial Sequence
  source: /note="Description of Artificial Sequence: Synthetic oligonucleotide"
  modified_base (9)..(16): a, c, t, g, unknown or other
rgatcccgnnnnnnnn

SEQ ID NO: 168 - DNA, 12 bp, Artificial Sequence
  source: /note="Description of Artificial Sequence: Synthetic oligonucleotide"
  modified_base (7)..(12): a, c, t, g, unknown or other
cccgtgnnnnnn

SEQ ID NO: 169 - DNA, 12 bp, Artificial Sequence
  source: /note="Description of Artificial Sequence: Synthetic oligonucleotide"
  modified_base (6)..(12): a, c, t, g, unknown or other
cccggnnnnnnn

SEQ ID NO: 170 - DNA, 12 bp, Artificial Sequence
  source: /note="Description of Artificial Sequence: Synthetic oligonucleotide"
  modified_base (6)..(12): a, c, t, g, unknown or other
cccgcnnnnnnn

SEQ ID NO: 171 - DNA, 16 bp, Artificial Sequence
  source: /note="Description of Artificial Sequence: Synthetic oligonucleotide"
  modified_base (9)..(16): a, c, t, g, unknown or other
tccgcccgnnnnnnnn

SEQ ID NO: 172 - DNA, 13 bp, Artificial Sequence
  source: /note="Description of Artificial Sequence: Synthetic oligonucleotide"
  modified_base (9)..(13): a, c, t, g, unknown or other
gacgtctcnnnnn

SEQ ID NO: 173 - DNA, 14 bp, Artificial Sequence
  source: /note="Description of Artificial Sequence: Synthetic oligonucleotide"
  modified_base (10)..(14): a, c, t, g, unknown or other
ccwggtctcnnnnn

SEQ ID NO: 174 - DNA, 12 bp, Artificial Sequence
  source: /note="Description of Artificial Sequence: Synthetic oligonucleotide"
  modified_base (8)..(12): a, c, t, g, unknown or other
gagtctcnnnnn

SEQ ID NO: 175 - DNA, 13 bp, Artificial Sequence
  source: /note="Description of Artificial Sequence: Synthetic oligonucleotide"
  modified_base (9)..(13): a, c, t, g, unknown or other
gcggtctcnnnnn

SEQ ID NO: 176 - DNA, 14 bp, Artificial Sequence
  source: /note="Description of Artificial Sequence: Synthetic oligonucleotide"
  modified_base (10)..(14): a, c, t, g, unknown or other
acrygtctcnnnnn

SEQ ID NO: 177 - DNA, 18 bp, Artificial Sequence
  source: /note="Description of Artificial Sequence: Synthetic oligonucleotide"
  modified_base (4)..(8): a, c, t, g, unknown or other
  modified_base (14)..(18): a, c, t, g, unknown or other
gacnnnnngtctcnnnnn

SEQ ID NO: 178 - DNA, 15 bp, Artificial Sequence
  source: /note="Description of Artificial Sequence: Synthetic oligonucleotide"
  modified_base (11)..(15): a, c, t, g, unknown or other
cggccgtctcnnnnn

SEQ ID NO: 179 - DNA, 15 bp, Artificial Sequence
  source: /note="Description of Artificial Sequence: Synthetic oligonucleotide"
  modified_base (11)..(15): a, c, t, g, unknown or other
cycgrgtctcnnnnn

SEQ ID NO: 180 - DNA, 14 bp, Artificial Sequence
  source: /note="Description of Artificial Sequence: Synthetic oligonucleotide"
  modified_base (10)..(14): a, c, t, g, unknown or other
rccggtctcnnnnn

SEQ ID NO: 181 - DNA, 15 bp, Artificial Sequence
  source: /note="Description of Artificial Sequence: Synthetic oligonucleotide"
  modified_base (11)..(15): a, c, t, g, unknown or other
ctcgagtctcnnnnn

SEQ ID NO: 182 - DNA, 13 bp, Artificial Sequence
  source: /note="Description of Artificial Sequence: Synthetic oligonucleotide"
  modified_base (9)..(13): a, c, t, g, unknown or other
cgcgtctcnnnnn

SEQ ID NO: 183 - DNA, 15 bp, Artificial Sequence
  source: /note="Description of Artificial Sequence: Synthetic oligonucleotide"
  modified_base (11)..(15): a, c, t, g, unknown or other
cycgrgtctcnnnnn

SEQ ID NO: 184 - DNA, 13 bp, Artificial Sequence
  source: /note="Description of Artificial Sequence: Synthetic oligonucleotide"
  modified_base (9)..(13): a, c, t, g, unknown or other
ccggtctcnnnnn

SEQ ID NO: 185 - DNA, 13 bp, Artificial Sequence
  source: /note="Description of Artificial Sequence: Synthetic oligonucleotide"
  modified_base (9)..(13): a, c, t, g, unknown or other
ctagtctcnnnnn

SEQ ID NO: 186 - DNA, 14 bp, Artificial Sequence
  source: /note="Description of Artificial Sequence: Synthetic oligonucleotide"
  modified_base (10)..(14): a, c, t, g, unknown or other
acgcgtctcnnnnn

SEQ ID NO: 187 - DNA, 15 bp, Artificial Sequence
  source: /note="Description of Artificial Sequence: Synthetic oligonucleotide"
  modified_base (11)..(15): a, c, t, g, unknown or other
ccwwggtctcnnnnn

SEQ ID NO: 188 - DNA, 14 bp, Artificial Sequence
  source: /note="Description of Artificial Sequence: Synthetic oligonucleotide"
  modified_base (10)..(14): a, c, t, g, unknown or other
ccwggtctcnnnnn

SEQ ID NO: 189 - DNA, 14 bp, Artificial Sequence
  source: /note="Description of Artificial Sequence: Synthetic oligonucleotide"
  modified_base (3)..(3): a, c, t, g, unknown or other
  modified_base (10)..(14): a, c, t, g, unknown or other
ctnagtctcnnnnn

SEQ ID NO: 190 - DNA, 11 bp, Artificial Sequence
  source: /note="Description of Artificial Sequence: Synthetic oligonucleotide"
  modified_base (7)..(11): a, c, t, g, unknown or other
cgtctcnnnnn

SEQ ID NO: 191 - DNA, 13 bp, Artificial Sequence
  source: /note="Description of Artificial Sequence: Synthetic oligonucleotide"
  modified_base (9)..(13): a, c, t, g, unknown or other
catgtctcnnnnn

SEQ ID NO: 192 - DNA, 13 bp, Artificial Sequence
  source: /note="Description of Artificial Sequence: Synthetic oligonucleotide"
  modified_base (9)..(13): a, c, t, g, unknown or other
cgcgtctcnnnnn

SEQ ID NO: 193 - DNA, 13 bp, Artificial Sequence
  source: /note="Description of Artificial Sequence: Synthetic oligonucleotide"
  modified_base (9)..(13): a, c, t, g, unknown or other
ccggtctcnnnnn

SEQ ID NO: 194 - DNA, 16 bp, Artificial Sequence
  source: /note="Description of Artificial Sequence: Synthetic oligonucleotide"
  modified_base (4)..(6): a, c, t, g, unknown or other
  modified_base (12)..(16): a, c, t, g, unknown or other
gacnnngtctcnnnnn

SEQ ID NO: 195 - DNA, 13 bp, Artificial Sequence
  source: /note="Description of Artificial Sequence: Synthetic oligonucleotide"
  modified_base (3)..(3): a, c, t, g, unknown or other
  modified_base (9)..(13): a, c, t, g, unknown or other
acngtctcnnnnn

SEQ ID NO: 196 - DNA, 14 bp, Artificial Sequence
  source: /note="Description of Artificial Sequence: Synthetic oligonucleotide"
  modified_base (3)..(3): a, c, t, g, unknown or other
  modified_base (10)..(14): a, c, t, g, unknown or other
ctnagtctcnnnnn

SEQ ID NO: 197 - DNA, 15 bp, Artificial Sequence
  source: /note="Description of Artificial Sequence: Synthetic oligonucleotide"
  modified_base (3)..(4): a, c, t, g, unknown or other
  modified_base (11)..(15): a, c, t, g, unknown or other
ccnnggtctcnnnnn

SEQ ID NO: 198 - DNA, 12 bp, Artificial Sequence
  source: /note="Description of Artificial Sequence: Synthetic oligonucleotide"
  modified_base (8)..(12): a, c, t, g, unknown or other
acgtctcnnnnn

SEQ ID NO: 199 - DNA, 13 bp, Artificial Sequence
  source: /note="Description of Artificial Sequence: Synthetic oligonucleotide"
  modified_base (9)..(13): a, c, t, g, unknown or other
gaggtctcnnnnn

SEQ ID NO: 200 - DNA, 10 bp, Artificial Sequence
  source: /note="Description of Artificial Sequence: Synthetic oligonucleotide"
  modified_base (7)..(10): a, c, t, g, unknown or other
gtctccnnnn

SEQ ID NO: 201 - DNA, 12 bp, Artificial Sequence
  source: /note="Description of Artificial Sequence: Synthetic oligonucleotide"
  modified_base (8)..(12): a, c, t, g, unknown or other
gagtctcnnnnn

SEQ ID NO: 202 - DNA, 14 bp, Artificial Sequence
  source: /note="Description of Artificial Sequence: Synthetic oligonucleotide"
  modified_base (10)..(14): a, c, t, g, unknown or other
ccaggtctcnnnnn

SEQ ID NO: 203 - DNA, 14 bp, Artificial Sequence
  source: /note="Description of Artificial Sequence: Synthetic oligonucleotide"
  modified_base (10)..(14): a, c, t, g, unknown or other
ccwggtctcnnnnn

SEQ ID NO: 204 - DNA, 14 bp, Artificial Sequence
  source: /note="Description of Artificial Sequence: Synthetic oligonucleotide"
  modified_base (10)..(14): a, c, t, g, unknown or other
vccggtctcnnnnn

SEQ ID NO: 205 - DNA, 14 bp, Artificial Sequence
  source: /note="Description of Artificial Sequence: Synthetic oligonucleotide"
  modified_base (10)..(14): a, c, t, g, unknown or other
tctggtctcnnnnn

SEQ ID NO: 206 - DNA, 15 bp, Artificial Sequence
  source: /note="Description of Artificial Sequence: Synthetic oligonucleotide"
  modified_base (11)..(15): a, c, t, g, unknown or other
ctcgagtctcnnnnn

SEQ ID NO: 207 - DNA, 14 bp, Artificial Sequence
  source: /note="Description of Artificial Sequence: Synthetic oligonucleotide"
  modified_base (10)..(14): a, c, t, g, unknown or other
rcatgtctcnnnnn

SEQ ID NO: 208 - DNA, 15 bp, Artificial Sequence
  source: /note="Description of Artificial Sequence: Synthetic oligonucleotide"
  modified_base (11)..(15): a, c, t, g, unknown or other
ccatggtctcnnnnn

SEQ ID NO: 209 - DNA, 15 bp, Artificial Sequence
  source: /note="Description of Artificial Sequence: Synthetic oligonucleotide"
  modified_base (11)..(15): a, c, t, g, unknown or other
cgatcgtctcnnnnn

SEQ ID NO: 210 - DNA, 13 bp, Artificial Sequence
  source: /note="Description of Artificial Sequence: Synthetic oligonucleotide"
  modified_base (9)..(13): a, c, t, g, unknown or other
ctagtctcnnnnn

SEQ ID NO: 211 - DNA, 15 bp, Artificial Sequence
  source: /note="Description of Artificial Sequence: Synthetic oligonucleotide"
  modified_base (11)..(15): a, c, t, g, unknown or other
ccatggtctcnnnnn

SEQ ID NO: 212 - DNA, 15 bp, Artificial Sequence
  source: /note="Description of Artificial Sequence: Synthetic oligonucleotide"
  modified_base (11)..(15): a, c, t, g, unknown or other
ccwwggtctcnnnnn

SEQ ID NO: 213 - DNA, 17 bp, Artificial Sequence
  source: /note="Description of Artificial Sequence: Synthetic oligonucleotide"
  modified_base (4)..(7): a, c, t, g, unknown or other
  modified_base (13)..(17): a, c, t, g, unknown or other
gcannnngtctcnnnnn

SEQ ID NO: 214 - DNA, 15 bp, Artificial Sequence
  source: /note="Description of Artificial Sequence: Synthetic oligonucleotide"
  modified_base (11)..(15): a, c, t, g, unknown or other
gaagagtctcnnnnn

SEQ ID NO: 215 - DNA, 14 bp, Artificial Sequence
  source: /note="Description of Artificial Sequence: Synthetic oligonucleotide"
  modified_base (10)..(14): a, c, t, g, unknown or other
castgtctcnnnnn

SEQ ID NO: 216 - DNA, 14 bp, Artificial Sequence
  source: /note="Description of Artificial Sequence: Synthetic oligonucleotide"
  modified_base (10)..(14): a, c, t, g, unknown or other
actggtctcnnnnn

SEQ ID NO: 217 - DNA, 13 bp, Artificial Sequence
  source: /note="Description of Artificial Sequence: Synthetic oligonucleotide"
  modified_base (9)..(13): a, c, t, g, unknown or other
ccagtctcnnnnn

SEQ ID NO: 218 - DNA, 13 bp, Artificial Sequence
  source: /note="Description of Artificial Sequence: Synthetic oligonucleotide"
  modified_base (9)..(13): a, c, t, g, unknown or other
gccgtctcnnnnn

SEQ ID NO: 219 - DNA, 13 bp, Artificial Sequence
  source: /note="Description of Artificial Sequence: Synthetic oligonucleotide"
  modified_base (9)..(13): a, c, t, g, unknown or other
gcggtctcnnnnn

SEQ ID NO: 220 - DNA, 13 bp, Artificial Sequence
  source: /note="Description of Artificial Sequence: Synthetic oligonucleotide"
  modified_base (9)..(13): a, c, t, g, unknown or other
gccgtctcnnnnn

SEQ ID NO: 221 - DNA, 11 bp, Artificial Sequence
  source: /note="Description of Artificial Sequence: Synthetic oligonucleotide"
  modified_base (7)..(11): a, c, t, g, unknown or other
ggtctcnnnnn

SEQ ID NO: 222 - DNA, 10 bp, Artificial Sequence
  source: /note="Description of Artificial Sequence: Synthetic oligonucleotide"
  modified_base (7)..(10): a, c, t, g, unknown or other
gtctccnnnn

SEQ ID NO: 223 - DNA, 14 bp, Artificial Sequence
  source: /note="Description of Artificial Sequence: Synthetic oligonucleotide"
  modified_base (10)..(14): a, c, t, g, unknown or other
gaaggtctcnnnnn

SEQ ID NO: 224 - DNA, 13 bp, Artificial Sequence
  source: /note="Description of Artificial Sequence: Synthetic oligonucleotide"
  modified_base (9)..(13): a, c, t, g, unknown or other
gccgtctcnnnnn

SEQ ID NO: 225 - DNA, 14 bp, Artificial Sequence
  source: /note="Description of Artificial Sequence: Synthetic oligonucleotide"
  modified_base (10)..(14): a, c, t, g, unknown or other
cccagtctcnnnnn

SEQ ID NO: 226 - DNA, 14 bp, Artificial Sequence
  source: /note="Description of Artificial Sequence: Synthetic oligonucleotide"
  modified_base (10)..(14): a, c, t, g, unknown or other
gcaggtctcnnnnn

SEQ ID NO: 227 - DNA, 11 bp, Artificial Sequence
  source: /note="Description of Artificial Sequence: Synthetic oligonucleotide"
  modified_base (7)..(11): a, c, t, g, unknown or other
ggtctcnnnnn

SEQ ID NO: 228 - DNA, 12 bp, Artificial Sequence
  source: /note="Description of Artificial Sequence: Synthetic oligonucleotide"
  modified_base (8)..(12): a, c, t, g, unknown or other
gcgtctcnnnnn

SEQ ID NO: 229 - DNA, 13 bp, Artificial Sequence
  source: /note="Description of Artificial Sequence: Synthetic oligonucleotide"
  modified_base (9)..(13): a, c, t, g, unknown or other
gaggtctcnnnnn

SEQ ID NO: 230 - DNA, 12 bp, Artificial Sequence
  source: /note="Description of Artificial Sequence: Synthetic oligonucleotide"
  modified_base (8)..(12): a, c, t, g, unknown or other
gcgtctcnnnnn

SEQ ID NO: 231 - DNA, 21 bp, Artificial Sequence
  source: /note="Description of Artificial Sequence: Synthetic oligonucleotide"
  modified_base (10)..(21): a, c, t, g, unknown or other
ccwggcagcnnnnnnnnnnnn

SEQ ID NO: 232 - DNA, 17 bp, Artificial Sequence
  source: /note="Description of Artificial Sequence: Synthetic oligonucleotide"
  modified_base (10)..(17): a, c, t, g, unknown or other
gcagccwggnnnnnnnn

SEQ ID NO: 233 - DNA, 19 bp, Artificial Sequence
  source: /note="Description of Artificial Sequence: Synthetic oligonucleotide"
  modified_base (8)..(19): a, c, t, g, unknown or other
ctgcagcnnnnnnnnnnnn

SEQ ID NO: 234 - DNA, 20 bp, Artificial Sequence
  source: /note="Description of Artificial Sequence: Synthetic oligonucleotide"
  modified_base (9)..(20): a, c, t, g, unknown or other
gcggcagcnnnnnnnnnnnn

SEQ ID NO: 235 - DNA, 17 bp, Artificial Sequence
  source: /note="Description of Artificial Sequence: Synthetic oligonucleotide"
  modified_base (8)..(17): a, c, t, g, unknown or other
gcagcggnnnnnnnnnn

SEQ ID NO: 236 - DNA, 19 bp, Artificial Sequence
  source: /note="Description of Artificial Sequence: Synthetic oligonucleotide"
  modified_base (8)..(19): a, c, t, g, unknown or other
ccgcagcnnnnnnnnnnnn

SEQ ID NO: 237 - DNA, 17 bp, Artificial Sequence
  source: /note="Description of Artificial Sequence: Synthetic oligonucleotide"
  modified_base (9)..(17): a, c, t, g, unknown or other
gcagccgcnnnnnnnnn

SEQ ID NO: 238 - DNA, 19 bp, Artificial Sequence
  source: /note="Description of Artificial Sequence: Synthetic oligonucleotide"
  modified_base (8)..(19): a, c, t, g, unknown or other
ctgcagcnnnnnnnnnnnn

SEQ ID NO: 239 - DNA, 17 bp, Artificial Sequence
  source: /note="Description of Artificial Sequence: Synthetic oligonucleotide"
  modified_base (7)..(17): a, c, t, g, unknown or other
gcagctnnnnnnnnnnn

SEQ ID NO: 240 - DNA, 17 bp, Artificial Sequence
  source: /note="Description of Artificial Sequence: Synthetic oligonucleotide"
  modified_base (7)..(17): a, c, t, g, unknown or other
gcagctnnnnnnnnnnn

SEQ ID NO: 241 - DNA, 22 bp, Artificial Sequence
  source: /note="Description of Artificial Sequence: Synthetic oligonucleotide"
  modified_base (11)..(22): a, c, t, g, unknown or other
cggccgcagcnnnnnnnnnnnn

SEQ ID NO: 242 - DNA, 17 bp, Artificial Sequence
  source: /note="Description of Artificial Sequence: Synthetic oligonucleotide"
  modified_base (11)..(17): a, c, t, g, unknown or other
gcagcggccgnnnnnnn

SEQ ID NO: 243 - DNA, 19 bp, Artificial Sequence
  source: /note="Description of Artificial Sequence: Synthetic oligonucleotide"
  modified_base (8)..(19): a, c, t, g, unknown or other
ctgcagcnnnnnnnnnnnn

SEQ ID NO: 244 - DNA, 22 bp, Artificial Sequence
  source: /note="Description of Artificial Sequence: Synthetic oligonucleotide"
  modified_base (11)..(22): a, c, t, g, unknown or other
cycgrgcagcnnnnnnnnnnnn

SEQ ID NO: 245 - DNA, 17 bp, Artificial Sequence
  source: /note="Description of Artificial Sequence: Synthetic oligonucleotide"
  modified_base (11)..(17): a, c, t, g, unknown or other
gcagcycgrgnnnnnnn

SEQ ID NO: 246 - DNA, 23 bp, Artificial Sequence
  source: /note="Description of Artificial Sequence: Synthetic oligonucleotide"
  modified_base (12)..(23): a, c, t, g, unknown or other
gcgatcgcagcnnnnnnnnnnnn

SEQ ID NO: 247 - DNA, 17 bp, Artificial Sequence
  source: /note="Description of Artificial Sequence: Synthetic oligonucleotide"
  modified_base (12)..(17): a, c, t, g, unknown or other
gcagcgatcgcnnnnnn

SEQ ID NO: 248 - DNA, 21 bp, Artificial Sequence
  source: /note="Description of Artificial Sequence: Synthetic oligonucleotide"
  modified_base (10)..(21): a, c, t, g, unknown or other
rccggcagcnnnnnnnnnnnn

SEQ ID NO: 249 - DNA, 17 bp, Artificial Sequence
  source: /note="Description of Artificial Sequence: Synthetic oligonucleotide"
  modified_base (10)..(17): a, c, t, g, unknown or other
gcagccggynnnnnnnn

SEQ ID NO: 250 - DNA, 22 bp, Artificial Sequence
  source: /note="Description of Artificial Sequence: Synthetic oligonucleotide"
  modified_base (11)..(22): a, c, t, g, unknown or other
ctcgagcagcnnnnnnnnnnnn

SEQ ID NO: 251 - DNA, 17 bp, Artificial Sequence
  source: /note="Description of Artificial Sequence: Synthetic oligonucleotide"
  modified_base (11)..(17): a, c, t, g, unknown or other
gcagctcgagnnnnnnn

SEQ ID NO: 252 - DNA, 20 bp, Artificial Sequence
  source: /note="Description of Artificial Sequence: Synthetic oligonucleotide"
  modified_base (9)..(20): a, c, t, g, unknown or other
cgcgcagcnnnnnnnnnnnn

SEQ ID NO: 253 - DNA, 17 bp, Artificial Sequence
  source: /note="Description of Artificial Sequence: Synthetic oligonucleotide"
  modified_base (9)..(17): a, c, t, g, unknown or other
gcagcgcgnnnnnnnnn

SEQ ID NO: 254 - DNA, 26 bp, Artificial Sequence
  source: /note="Description of Artificial Sequence: Synthetic oligonucleotide"
  modified_base (4)..(8): a, c, t, g, unknown or other
  modified_base (15)..(26): a, c, t, g, unknown or other
gccnnnnnggcagcnnnnnnnnnnnn

SEQ ID NO: 255 - DNA, 17 bp, Artificial Sequence
  source: /note="Description of Artificial Sequence: Synthetic oligonucleotide"
  modified_base (8)..(17): a, c, t, g, unknown or other
gcagctsnnnnnnnnnn

SEQ ID NO: 256 - DNA, 22 bp, Artificial Sequence
  source: /note="Description of Artificial Sequence: Synthetic oligonucleotide"
  modified_base (11)..(22): a, c, t, g, unknown or other
cycgrgcagcnnnnnnnnnnnn

SEQ ID NO: 257 - DNA, 17 bp, Artificial Sequence
  source: /note="Description of Artificial Sequence: Synthetic oligonucleotide"
  modified_base (11)..(17): a, c, t, g, unknown or other
gcagcycgrgnnnnnnn

SEQ ID NO: 258 - DNA, 20 bp, Artificial Sequence
  source: /note="Description of Artificial Sequence: Synthetic oligonucleotide"
  modified_base (9)..(20): a, c, t, g, unknown or other
ccggcagcnnnnnnnnnnnn

SEQ ID NO: 259 - DNA, 17 bp, Artificial Sequence
  source: /note="Description of Artificial Sequence: Synthetic oligonucleotide"
  modified_base (9)..(17): a, c, t, g, unknown or other
gcagccggnnnnnnnnn

SEQ ID NO: 260 - DNA, 20 bp, Artificial Sequence
  source: /note="Description of Artificial Sequence: Synthetic oligonucleotide"
  modified_base (9)..(20): a, c, t, g, unknown or other
ctagcagcnnnnnnnnnnnn

SEQ ID NO: 261 - DNA, 17 bp, Artificial Sequence
  source: /note="Description of Artificial Sequence: Synthetic oligonucleotide"
  modified_base (9)..(17): a, c, t, g, unknown or other
gcagctagnnnnnnnnn

SEQ ID NO: 262 - DNA, 21 bp, Artificial Sequence
  source: /note="Description of Artificial Sequence: Synthetic oligonucleotide"
  modified_base (3)..(4): a, c, t, g, unknown or other
  modified_base (10)..(21): a, c, t, g, unknown or other
gcnngcagcnnnnnnnnnnnn

SEQ ID NO: 263 - DNA, 17 bp, Artificial Sequence
  source: /note="Description of Artificial Sequence: Synthetic oligonucleotide"
  modified_base (6)..(7): a, c, t, g, unknown or other
  modified_base (10)..(17): a, c, t, g, unknown or other
gcagcnngcnnnnnnnn

SEQ ID NO: 264 - DNA, 22 bp, Artificial Sequence
  source: /note="Description of Artificial Sequence: Synthetic oligonucleotide"
  modified_base (11)..(22): a, c, t, g, unknown or other
ygccggcagcnnnnnnnnnnnn

SEQ ID NO: 265 - DNA, 22 bp, Artificial Sequence
  source: /note="Description of Artificial Sequence: Synthetic oligonucleotide"
  modified_base (11)..(22): a, c, t, g, unknown or other
ccwwggcagcnnnnnnnnnnnn

SEQ ID NO: 266 - DNA, 17 bp, Artificial Sequence
  source: /note="Description of Artificial Sequence: Synthetic oligonucleotide"
  modified_base (11)..(17): a, c, t, g, unknown or other
gcagccwwggnnnnnnn

SEQ ID NO: 267 - DNA, 21 bp, Artificial Sequence
  source: /note="Description of Artificial Sequence: Synthetic oligonucleotide"
  modified_base (10)..(21): a, c, t, g, unknown or other
ccwggcagcnnnnnnnnnnnn

SEQ ID NO: 268 - DNA, 17 bp, Artificial Sequence
  source: /note="Description of Artificial Sequence: Synthetic oligonucleotide"
  modified_base (10)..(17): a, c, t, g, unknown or other
gcagccwggnnnnnnnn

SEQ ID NO: 269 - DNA, 21 bp, Artificial Sequence
  source: /note="Description of Artificial Sequence: Synthetic oligonucleotide"
  modified_base (10)..(21): a, c, t, g, unknown or other
gccggcagcnnnnnnnnnnnn

SEQ ID NO: 270 - DNA, 17 bp, Artificial Sequence
  source: /note="Description of Artificial Sequence: Synthetic oligonucleotide"
  modified_base (10)..(17): a, c, t, g, unknown or other
gcagccggcnnnnnnnn

SEQ ID NO: 271 - DNA, 17 bp, Artificial Sequence
  source: /note="Description of Artificial Sequence: Synthetic oligonucleotide"
  modified_base (7)..(17): a, c, t, g, unknown or other
gcagcbnnnnnnnnnnn

SEQ ID NO: 272 - DNA, 18 bp, Artificial Sequence
  source: /note="Description of Artificial Sequence: Synthetic oligonucleotide"
  modified_base (7)..(18): a, c, t, g, unknown or other
tgcagcnnnnnnnnnnnn

SEQ ID NO: 273 - DNA, 21 bp, Artificial Sequence
  source: /note="Description of Artificial Sequence: Synthetic oligonucleotide"
  modified_base (3)..(3): a, c, t, g, unknown or other
  modified_base (10)..(21): a, c, t, g, unknown or other
ctnagcagcnnnnnnnnnnnn

SEQ ID NO: 274 - DNA, 17 bp, Artificial Sequence
  source: /note="Description of Artificial Sequence: Synthetic oligonucleotide"
  modified_base (7)..(7): a, c, t, g, unknown or other
  modified_base (10)..(17): a, c, t, g, unknown or other
gcagctnagnnnnnnnn

SEQ ID NO: 275 - DNA, 19 bp, Artificial Sequence
  source: /note="Description of Artificial Sequence: Synthetic oligonucleotide"
  modified_base (8)..(19): a, c, t, g, unknown or other
ctgcagcnnnnnnnnnnnn

SEQ ID NO: 276 - DNA, 20 bp, Artificial Sequence
  source: /note="Description of Artificial Sequence: Synthetic oligonucleotide"
  modified_base (9)..(20): a, c, t, g, unknown or other
catgcagcnnnnnnnnnnnn

SEQ ID NO: 277 - DNA, 17 bp, Artificial Sequence
  source: /note="Description of Artificial Sequence: Synthetic oligonucleotide"
  modified_base (9)..(17): a, c, t, g, unknown or other
gcagcatgnnnnnnnnn

SEQ ID NO: 278 - DNA, 20 bp, Artificial Sequence
  source: /note="Description of Artificial Sequence: Synthetic oligonucleotide"
  modified_base (9)..(20): a, c, t, g, unknown or other
cgcgcagcnnnnnnnnnnnn

SEQ ID NO: 279 - DNA, 17 bp, Artificial Sequence
  source: /note="Description of Artificial Sequence: Synthetic oligonucleotide"
  modified_base (9)..(17): a, c, t, g, unknown or other
gcagcgcgnnnnnnnnn

SEQ ID NO: 280 - DNA, 20 bp, Artificial Sequence
  source: /note="Description of Artificial Sequence: Synthetic oligonucleotide"
  modified_base (9)..(20): a, c, t, g, unknown or other
ccggcagcnnnnnnnnnnnn

SEQ ID NO: 281 - DNA, 17 bp, Artificial Sequence
  source: /note="Description of Artificial Sequence: Synthetic oligonucleotide"
  modified_base (9)..(17): a, c, t, g, unknown or other
gcagccggnnnnnnnnn

SEQ ID NO: 282 - DNA, 17 bp, Artificial Sequence
  source: /note="Description of Artificial Sequence: Synthetic oligonucleotide"
  modified_base (8)..(17): a, c, t, g, unknown or other
gcagctgnnnnnnnnnn

SEQ ID NO: 283 - DNA, 19 bp, Artificial Sequence
  source: /note="Description of Artificial Sequence: Synthetic oligonucleotide"
  modified_base (8)..(19): a, c, t, g, unknown or other
gcgcagcnnnnnnnnnnnn

SEQ ID NO: 284 - DNA, 17 bp, Artificial Sequence
  source: /note="Description of Artificial Sequence: Synthetic oligonucleotide"
  modified_base (8)..(17): a, c, t, g, unknown or other
gcagcgcnnnnnnnnnn

SEQ ID NO: 285 - DNA, 21 bp, Artificial Sequence
  source: /note="Description of Artificial Sequence: Synthetic oligonucleotide"
  modified_base (10)..(21): a, c, t, g, unknown or other
mgcwgcagcnnnnnnnnnnnn

SEQ ID NO: 286 - DNA, 18 bp, Artificial Sequence
  source: /note="Description of Artificial Sequence: Synthetic oligonucleotide"
  modified_base (8)..(18): a, c, t, g, unknown or other
mgcagcdnnnnnnnnnnn

SEQ ID NO: 287 - DNA, 18 bp, Artificial Sequence
  source: /note="Description of Artificial Sequence: Synthetic oligonucleotide"
  modified_base (8)..(18): a, c, t, g, unknown or other
hgcagcknnnnnnnnnnn

SEQ ID NO: 288 - DNA, 17 bp, Artificial Sequence
  source: /note="Description of Artificial Sequence: Synthetic oligonucleotide"
  modified_base (10)..(17): a, c, t, g, unknown or other
gcagcwgcknnnnnnnn

SEQ ID NO: 289 - DNA, 21 bp, Artificial Sequence
  source: /note="Description of Artificial Sequence: Synthetic oligonucleotide"
  modified_base (3)..(3): a, c, t, g, unknown or other
  modified_base (10)..(21): a, c, t, g, unknown or other
ctnagcagcnnnnnnnnnnnn

SEQ ID NO: 290 - DNA, 17 bp, Artificial Sequence
  source: /note="Description of Artificial Sequence: Synthetic oligonucleotide"
  modified_base (7)..(7): a, c, t, g, unknown or other
  modified_base (10)..(17): a, c, t, g, unknown or other
gcagctnagnnnnnnnn

SEQ ID NO: 291 - DNA, 19 bp, Artificial Sequence
  source: /note="Description of Artificial Sequence: Synthetic oligonucleotide"
  modified_base (8)..(19): a, c, t, g, unknown or other
ctgcagcnnnnnnnnnnnn

SEQ ID NO: 292 - DNA, 22 bp, Artificial Sequence
  source: /note="Description of Artificial Sequence: Synthetic oligonucleotide"
  modified_base (3)..(4): a, c, t, g, unknown or other
  modified_base (11)..(22): a, c, t, g, unknown or other
ccnnggcagcnnnnnnnnnnnn

SEQ ID NO: 293 - DNA, 17 bp, Artificial Sequence
  source: /note="Description of Artificial Sequence: Synthetic oligonucleotide"
  modified_base (7)..(8): a, c, t, g, unknown or other
  modified_base (11)..(17): a, c, t, g, unknown or other
gcagccnnggnnnnnnn

SEQ ID NO: 294 - DNA, 17 bp, Artificial Sequence
  source: /note="Description of Artificial Sequence: Synthetic oligonucleotide"
  modified_base (9)..(17): a, c, t, g, unknown or other
gcagcctcnnnnnnnnn

SEQ ID NO: 295 - DNA, 20 bp, Artificial Sequence
  source: /note="Description of Artificial Sequence: Synthetic oligonucleotide"
  modified_base (9)..(20): a, c, t, g, unknown or other
gaggcagcnnnnnnnnnnnn

SEQ ID NO: 296 - DNA, 17 bp, Artificial Sequence
  source: /note="Description of Artificial Sequence: Synthetic oligonucleotide"
  modified_base (7)..(17): a, c, t, g, unknown or other
gcagctnnnnnnnnnnn

SEQ ID NO: 297 - DNA, 17 bp, Artificial Sequence
  source: /note="Description of Artificial Sequence: Synthetic oligonucleotide"
  modified_base (7)..(17): a, c, t, g, unknown or other
gcagcynnnnnnnnnnn

SEQ ID NO: 298 - DNA, 17 bp, Artificial Sequence
  source: /note="Description of Artificial Sequence: Synthetic oligonucleotide"
  modified_base (10)..(17): a, c, t, g, unknown or other
gcagcctggnnnnnnnn

SEQ ID NO: 299 - DNA, 21 bp, Artificial Sequence
  source: /note="Description of Artificial Sequence: Synthetic oligonucleotide"
  modified_base (10)..(21): a, c, t, g, unknown or other
ccaggcagcnnnnnnnnnnnn

SEQ ID NO: 300 - DNA, 21 bp, Artificial Sequence
  source: /note="Description of Artificial Sequence: Synthetic oligonucleotide"
  modified_base (10)..(21): a, c, t, g, unknown or other
ccwggcagcnnnnnnnnnnnn

SEQ ID NO: 301 - DNA, 17 bp, Artificial Sequence
  source: /note="Description of Artificial Sequence: Synthetic oligonucleotide"
  modified_base (10)..(17): a, c, t, g, unknown or other
gcagccwggnnnnnnnn

SEQ ID NO: 302 - DNA, 17 bp, Artificial Sequence
  source: /note="Description of Artificial Sequence: Synthetic oligonucleotide"
  modified_base (9)..(17): a, c, t, g, unknown or other
gcagcgcynnnnnnnnn

SEQ ID NO: 303 - DNA, 21 bp, Artificial Sequence
  source: /note="Description of Artificial Sequence: Synthetic oligonucleotide"
  modified_base (10)..(21): a, c, t, g, unknown or other
gctagcagcnnnnnnnnnnnn

SEQ ID NO: 304 - DNA, 17 bp, Artificial Sequence
  source: /note="Description of Artificial Sequence: Synthetic oligonucleotide"
  modified_base (10)..(17): a, c, t, g, unknown or other
gcagctagcnnnnnnnn

SEQ ID NO: 305 - DNA, 21 bp, Artificial Sequence
  source: /note="Description of Artificial Sequence: Synthetic oligonucleotide"
  modified_base (10)..(21): a, c, t, g, unknown or other
gcgcgcagcnnnnnnnnnnnn

SEQ ID NO: 306 - DNA, 17 bp, Artificial Sequence
  source: /note="Description of Artificial Sequence: Synthetic oligonucleotide"
  modified_base (10)..(17): a, c, t, g, unknown or other
gcagcgcgcnnnnnnnn

SEQ ID NO: 307 - DNA, 21 bp, Artificial Sequence
  source: /note="Description of Artificial Sequence: Synthetic oligonucleotide"
  modified_base (10)..(21): a, c, t, g, unknown or other
vccggcagcnnnnnnnnnnnn

SEQ ID NO: 308 - DNA, 17 bp, Artificial Sequence
  source: /note="Description of Artificial Sequence: Synthetic oligonucleotide"
  modified_base (10)..(17): a, c, t, g, unknown or other
gcagccggbnnnnnnnn

SEQ ID NO: 309 - DNA, 21 bp, Artificial Sequence
  source: /note="Description of Artificial Sequence: Synthetic oligonucleotide"
  modified_base (10)..(21): a, c, t, g, unknown or other
tctggcagcnnnnnnnnnnnn

SEQ ID NO: 310 - DNA, 17 bp, Artificial Sequence
  source: /note="Description of Artificial Sequence: Synthetic oligonucleotide"
  modified_base (10)..(17): a, c, t, g, unknown or other
gcagccagannnnnnnn

SEQ ID NO: 311 - DNA, 22 bp, Artificial Sequence
  source: /note="Description of Artificial Sequence: Synthetic oligonucleotide"
  modified_base (11)..(22): a, c, t, g, unknown or other
ctcgagcagcnnnnnnnnnnnn

SEQ ID NO: 312 - DNA, 17 bp, Artificial Sequence
  source: /note="Description of Artificial Sequence: Synthetic oligonucleotide"
  modified_base (11)..(17): a, c, t, g, unknown or other
gcagctcgagnnnnnnn

SEQ ID NO: 313 - DNA, 21 bp, Artificial Sequence
  source: /note="Description of Artificial Sequence: Synthetic oligonucleotide"
  modified_base (10)..(21): a, c, t, g, unknown or other
rcatgcagcnnnnnnnnnnnn

SEQ ID NO: 314 - DNA, 17 bp, Artificial Sequence
  source: /note="Description of Artificial Sequence: Synthetic oligonucleotide"
  modified_base (10)..(17): a, c, t, g, unknown or other
gcagcatgynnnnnnnn

SEQ ID NO: 315 - DNA, 17 bp, Artificial Sequence
  source: /note="Description of Artificial Sequence: Synthetic oligonucleotide"
  modified_base (8)..(17): a, c, t, g, unknown or other
gcagctcnnnnnnnnnn

SEQ ID NO: 316 - DNA, 22 bp, Artificial Sequence
  source: /note="Description of Artificial Sequence: Synthetic oligonucleotide"
  modified_base (11)..(22): a, c, t, g, unknown or other
ccatggcagcnnnnnnnnnnnn

SEQ ID NO: 317 - DNA, 17 bp, Artificial Sequence
  source: /note="Description of Artificial Sequence: Synthetic oligonucleotide"
  modified_base (11)..(17): a, c, t, g, unknown or other
gcagccatggnnnnnnn

SEQ ID NO: 318 - DNA, 22 bp, Artificial Sequence
  source: /note="Description of Artificial Sequence: Synthetic oligonucleotide"
  modified_base (11)..(22): a, c, t, g, unknown or other
cgatcgcagcnnnnnnnnnnnn

SEQ ID NO: 319 - DNA, 17 bp, Artificial Sequence
  source: /note="Description of Artificial Sequence: Synthetic oligonucleotide"
  modified_base (11)..(17): a, c, t, g, unknown or other
gcagcgatcgnnnnnnn

SEQ ID NO: 320 - DNA, 20 bp, Artificial Sequence
  source: /note="Description of Artificial Sequence: Synthetic oligonucleotide"
  modified_base (9)..(20): a, c, t, g, unknown or other
ctagcagcnnnnnnnnnnnn

SEQ ID NO: 321 - DNA, 17 bp, Artificial Sequence
  source: /note="Description of Artificial Sequence: Synthetic oligonucleotide"
  modified_base (9)..(17): a, c, t, g, unknown or other
gcagctagnnnnnnnnn

SEQ ID NO: 322 - DNA, 22 bp, Artificial Sequence
  source: /note="Description of Artificial Sequence: Synthetic oligonucleotide"
  modified_base (11)..(22): a, c, t, g, unknown or other
ccatggcagcnnnnnnnnnnnn

SEQ ID NO: 323 - DNA, 17 bp, Artificial Sequence
  source: /note="Description of Artificial Sequence: Synthetic oligonucleotide"
  modified_base (11)..(17): a, c, t, g, unknown or other
gcagccatggnnnnnnn

SEQ ID NO: 324 - DNA, 17 bp, Artificial Sequence
  source: /note="Description of Artificial Sequence: Synthetic oligonucleotide"
  modified_base (8)..(17): a, c, t, g, unknown or other
gcagctgnnnnnnnnnn

SEQ ID NO: 325 - DNA, 22 bp, Artificial Sequence
  source: /note="Description of Artificial Sequence: Synthetic oligonucleotide"
  modified_base (11)..(22): a, c, t, g, unknown or other
ccwwggcagcnnnnnnnnnnnn

SEQ ID NO: 326 - DNA, 17 bp, Artificial Sequence
  source: /note="Description of Artificial Sequence: Synthetic oligonucleotide"
  modified_base (11)..(17): a, c, t, g, unknown or other
gcagccwwggnnnnnnn

SEQ ID NO: 327 - DNA, 17 bp, Artificial Sequence
  source: /note="Description of Artificial Sequence: Synthetic oligonucleotide"
  modified_base (6)..(7): a, c, t, g, unknown or other
  modified_base (11)..(17): a, c, t, g, unknown or other
gcagcnngtcnnnnnnn

SEQ ID NO: 328 - DNA, 22 bp, Artificial Sequence
  source: /note="Description of Artificial Sequence: Synthetic oligonucleotide"
  modified_base (11)..(22): a, c, t, g, unknown or other
gaagagcagcnnnnnnnnnnnn

SEQ ID NO: 329 - DNA, 17 bp, Artificial Sequence
  source: /note="Description of Artificial Sequence: Synthetic oligonucleotide"
  modified_base (11)..(17): a, c, t, g, unknown or other
gcagctcttcnnnnnnn

SEQ ID NO: 330 - DNA, 21 bp, Artificial Sequence
  source: /note="Description of Artificial Sequence: Synthetic oligonucleotide"
  modified_base (10)..(21): a, c, t, g, unknown or other
castgcagcnnnnnnnnnnnn

SEQ ID NO: 331 - DNA, 17 bp, Artificial Sequence
  source: /note="Description of Artificial Sequence: Synthetic oligonucleotide"
  modified_base (10)..(17): a, c, t, g, unknown or other
gcagcastgnnnnnnnn

SEQ ID NO: 332 - DNA, 21 bp, Artificial Sequence
  source: /note="Description of Artificial Sequence: Synthetic oligonucleotide"
  modified_base (10)..(21): a, c, t, g, unknown or other
gcgcgcagcnnnnnnnnnnnn

SEQ ID NO: 333 - DNA, 17 bp, Artificial Sequence
  source: /note="Description of Artificial Sequence: Synthetic oligonucleotide"
  modified_base (10)..(17): a, c, t, g, unknown or other
gcagcgcgcnnnnnnnn

SEQ ID NO: 334 - DNA, 21 bp, Artificial Sequence
  source: /note="Description of Artificial Sequence: Synthetic oligonucleotide"
  modified_base (10)..(21): a, c, t, g, unknown or other
actggcagcnnnnnnnnnnnn

SEQ ID NO: 335 - DNA, 17 bp, Artificial Sequence
  source: /note="Description of Artificial Sequence: Synthetic oligonucleotide"
  modified_base (10)..(17): a, c, t, g, unknown or other
gcagccagtnnnnnnnn

SEQ ID NO: 336 - DNA, 20 bp, Artificial Sequence
  source: /note="Description of Artificial Sequence: Synthetic oligonucleotide"
  modified_base (9)..(20): a, c, t, g, unknown or other
gcggcagcnnnnnnnnnnnn

SEQ ID NO: 337 - DNA, 17 bp, Artificial Sequence
  source: /note="Description of Artificial Sequence: Synthetic oligonucleotide"
  modified_base (9)..(17): a, c, t, g, unknown or other
gcagccgcnnnnnnnnn

SEQ ID NO: 338 - DNA, 20 bp, Artificial Sequence
  source: /note="Description of Artificial Sequence: Synthetic oligonucleotide"
  modified_base (9)..(20): a, c, t, g, unknown or other
gacgcagcnnnnnnnnnnnn

SEQ ID NO: 339 - DNA, 17 bp, Artificial Sequence
  source: /note="Description of Artificial Sequence: Synthetic oligonucleotide"
  modified_base (9)..(17): a, c, t, g, unknown or other
gcagcgtcnnnnnnnnn

SEQ ID NO: 340 - DNA, 17 bp, Artificial Sequence
  source: /note="Description of Artificial Sequence: Synthetic oligonucleotide"
  modified_base (10)..(17): a, c, t, g, unknown or other
gcagccttcnnnnnnnn

SEQ ID NO: 341 - DNA, 21 bp, Artificial Sequence
  source: /note="Description of Artificial Sequence: Synthetic oligonucleotide"
  modified_base (10)..(21): a, c, t, g, unknown or other
gaaggcagcnnnnnnnnnnnn

SEQ ID NO: 342 - DNA, 22 bp, Artificial Sequence
  source: /note="Description of Artificial Sequence: Synthetic oligonucleotide"
  modified_base (11)..(22): a, c, t, g, unknown or other
gaagagcagcnnnnnnnnnnnn

SEQ ID NO: 343 - DNA, 17 bp, Artificial Sequence
  source: /note="Description of Artificial Sequence: Synthetic oligonucleotide"
  modified_base (11)..(17): a, c, t, g, unknown or other
gcagctcttcnnnnnnn

SEQ ID NO: 344 - DNA, 17 bp, Artificial Sequence
  source: /note="Description of Artificial Sequence: Synthetic oligonucleotide"
  modified_base (9)..(17): a, c, t, g, unknown or other
gcagccgtnnnnnnnnn

SEQ ID NO: 345 - DNA, 20 bp, Artificial Sequence
  source: /note="Description of Artificial Sequence: Synthetic oligonucleotide"
  modified_base (9)..(20): a, c, t, g, unknown or other
acggcagcnnnnnnnnnnnn

SEQ ID NO: 346 - DNA, 17 bp, Artificial Sequence
  source: /note="Description of Artificial Sequence: Synthetic oligonucleotide"
  modified_base (9)..(17): a, c, t, g, unknown or other
gcagcctcnnnnnnnnn

SEQ ID NO: 347 - DNA, 20 bp, Artificial Sequence
  source: /note="Description of Artificial Sequence: Synthetic oligonucleotide"
  modified_base (9)..(20): a, c, t, g, unknown or other
gaggcagcnnnnnnnnnnnn

SEQ ID NO: 348 - DNA, 18 bp, Artificial Sequence
  source: /note="Description of Artificial Sequence: Synthetic oligonucleotide"
  modified_base (10)..(18): a, c, t, g, unknown or other
ccwggcatcnnnnnnnnn

SEQ ID NO: 349 - DNA, 14 bp, Artificial Sequence
  source: /note="Description of Artificial Sequence: Synthetic oligonucleotide"
  modified_base (10)..(14): a, c, t, g, unknown or other
gcatccwggnnnnn

SEQ ID NO: 350 - DNA, 17 bp, Artificial Sequence
  source: /note="Description of Artificial Sequence: Synthetic oligonucleotide"
  modified_base (9)..(17): a, c, t, g, unknown or other
gcggcatcnnnnnnnnn

SEQ ID NO: 351 - DNA, 16 bp, Artificial Sequence
  source: /note="Description of Artificial Sequence: Synthetic oligonucleotide"
  modified_base (8)..(16): a, c, t, g, unknown or other
ccgcatcnnnnnnnnn

SEQ ID NO: 352 - DNA, 14 bp, Artificial Sequence
  source: /note="Description of Artificial Sequence: Synthetic oligonucleotide"
  modified_base (9)..(14): a, c, t, g, unknown or other
gcatccgcnnnnnn

SEQ ID NO: 353 - DNA, 19 bp, Artificial Sequence
  source: /note="Description of Artificial Sequence: Synthetic oligonucleotide"
  modified_base (11)..(19): a, c, t, g, unknown or other
cggccgcatcnnnnnnnnn

SEQ ID NO: 354 - DNA, 14 bp, Artificial Sequence
  source: /note="Description of Artificial Sequence: Synthetic oligonucleotide"
  modified_base (11)..(14): a, c, t, g, unknown or other
gcatcggccgnnnn

SEQ ID NO: 355 - DNA, 19 bp, Artificial Sequence
  source: /note="Description of Artificial Sequence: Synthetic oligonucleotide"
  modified_base (11)..(19): a, c, t, g, unknown or other
cycgrgcatcnnnnnnnnn

SEQ ID NO: 356 - DNA, 14 bp, Artificial Sequence
  source: /note="Description of Artificial Sequence: Synthetic oligonucleotide"
  modified_base (11)..(14): a, c, t, g, unknown or other
gcatcycgrgnnnn

SEQ ID NO: 357 - DNA, 20 bp, Artificial Sequence
  source: /note="Description of Artificial Sequence: Synthetic oligonucleotide"
  modified_base (12)..(20): a, c, t, g, unknown or other
gcgatcgcatcnnnnnnnnn

SEQ ID NO: 358 - DNA, 18 bp, Artificial Sequence
  source: /note="Description of Artificial Sequence: Synthetic oligonucleotide"
  modified_base (10)..(18): a, c, t, g, unknown or other
rccggcatcnnnnnnnnn

SEQ ID NO: 359 - DNA, 17 bp, Artificial Sequence
  source: /note="Description of Artificial Sequence: Synthetic oligonucleotide"
  modified_base (9)..(17): a, c, t, g, unknown or other
gcwgcatcnnnnnnnnn

SEQ ID NO: 360 - DNA, 17 bp, Artificial Sequence
  source: /note="Description of Artificial Sequence: Synthetic oligonucleotide"
  modified_base (9)..(17): a, c, t, g, unknown or other
gctgcatcnnnnnnnnn

SEQ ID NO: 361 - DNA, 17 bp, Artificial Sequence
  source: /note="Description of Artificial Sequence: Synthetic oligonucleotide"
  modified_base (9)..(17): a, c, t, g, unknown or other
gcagcatcnnnnnnnnn

SEQ ID NO: 362 - DNA, 19 bp, Artificial Sequence
  source: /note="Description of Artificial Sequence: Synthetic oligonucleotide"
  modified_base (11)..(19): a, c, t, g, unknown or other
ctcgagcatcnnnnnnnnn

SEQ ID NO: 363 - DNA, 14 bp, Artificial Sequence
  source: /note="Description of Artificial Sequence: Synthetic oligonucleotide"
  modified_base (11)..(14): a, c, t, g, unknown or other
gcatctcgagnnnn

SEQ ID NO: 364 - DNA, 17 bp, Artificial Sequence
  source: /note="Description of Artificial Sequence: Synthetic oligonucleotide"
  modified_base (9)..(17): a, c, t, g, unknown or other
cgcgcatcnnnnnnnnn

SEQ ID NO: 365 - DNA, 14 bp, Artificial Sequence
  source: /note="Description of Artificial Sequence: Synthetic oligonucleotide"
  modified_base (9)..(14): a, c, t, g, unknown or other
gcatcgcgnnnnnn

SEQ ID NO: 366 - DNA, 16 bp, Artificial Sequence
  source: /note="Description of Artificial Sequence: Synthetic oligonucleotide"
  modified_base (8)..(16): a, c, t, g, unknown or other
atgcatcnnnnnnnnn

SEQ ID NO: 367 - DNA, 23 bp, Artificial Sequence
  source: /note="Description of Artificial Sequence: Synthetic oligonucleotide"
  modified_base (4)..(8): a, c, t, g, unknown or other
  modified_base (15)..(23): a, c, t, g, unknown or other
gccnnnnnggcatcnnnnnnnnn

SEQ ID NO: 368 - DNA, 14 bp, Artificial Sequence
  source: /note="Description of Artificial Sequence: Synthetic oligonucleotide"
  modified_base (9)..(14): a, c, t, g, unknown or other
gcatcgatnnnnnn

SEQ ID NO: 369 - DNA, 19 bp, Artificial Sequence
  source: /note="Description of Artificial Sequence: Synthetic oligonucleotide"
  modified_base (11)..(19): a, c, t, g, unknown or other
cycgrgcatcnnnnnnnnn

SEQ ID NO: 370 - DNA, 14 bp, Artificial Sequence
  source: /note="Description of Artificial Sequence: Synthetic oligonucleotide"
  modified_base (11)..(14): a, c, t, g, unknown or other
gcatcycgrgnnnn

SEQ ID NO: 371 - DNA, 17 bp, Artificial Sequence
  source: /note="Description of Artificial Sequence: Synthetic oligonucleotide"
  modified_base (9)..(17): a, c, t, g, unknown or other
ccggcatcnnnnnnnnn

SEQ ID NO: 372 - DNA, 14 bp, Artificial Sequence
  source: /note="Description of Artificial Sequence: Synthetic oligonucleotide"
  modified_base (9)..(14): a, c, t, g, unknown or other
gcatccggnnnnnn

SEQ ID NO: 373 - DNA, 17 bp, Artificial Sequence
  source: /note="Description of Artificial Sequence: Synthetic oligonucleotide"
  modified_base (9)..(17): a, c, t, g, unknown or other
ctagcatcnnnnnnnnn

SEQ ID NO: 374 - DNA, 14 bp, Artificial Sequence
  source: /note="Description of Artificial Sequence: Synthetic oligonucleotide"
  modified_base (9)..(14): a, c, t, g, unknown or other
gcatctagnnnnnn

SEQ ID NO: 375 - DNA, 18 bp, Artificial Sequence
  source: /note="Description of Artificial Sequence: Synthetic oligonucleotide"
  modified_base (3)..(4): a, c, t, g, unknown or other
  modified_base (10)..(18): a, c, t, g, unknown or other
gcnngcatcnnnnnnnnn

SEQ ID NO: 376 - DNA, 14 bp, Artificial Sequence
  source: /note="Description of Artificial Sequence: Synthetic oligonucleotide"
  modified_base (10)..(14): a, c, t, g, unknown or other
gcatccggannnnn

SEQ ID NO: 377 - DNA, 19 bp, Artificial Sequence
  source: /note="Description of Artificial Sequence: Synthetic oligonucleotide"
  modified_base (11)..(19): a, c, t, g, unknown or other
ygccggcatcnnnnnnnnn

SEQ ID NO: 378 - DNA, 17 bp, Artificial Sequence
  source: /note="Description of Artificial Sequence: Synthetic oligonucleotide"
  modified_base (3)..(3): a, c, t, g, unknown or other
  modified_base (9)..(17): a, c, t, g, unknown or other
gcngcatcnnnnnnnnn

SEQ ID NO: 379 - DNA, 19 bp, Artificial Sequence
  source: /note="Description of Artificial Sequence: Synthetic oligonucleotide"
  modified_base (11)..(19): a, c, t, g, unknown or other
ccwwggcatcnnnnnnnnn

SEQ ID NO: 380 - DNA, 14 bp, Artificial Sequence
  source: /note="Description of Artificial Sequence: Synthetic oligonucleotide"
  modified_base (11)..(14): a, c, t, g, unknown or other
gcatccwwggnnnn

SEQ ID NO: 381 - DNA, 18 bp, Artificial Sequence
  source: /note="Description of Artificial Sequence: Synthetic oligonucleotide"
  modified_base (10)..(18): a, c, t, g, unknown or other
ccwggcatcnnnnnnnnn

SEQ ID NO: 382 - DNA, 14 bp, Artificial Sequence
  source: /note="Description of Artificial Sequence: Synthetic oligonucleotide"
  modified_base (10)..(14): a, c, t, g, unknown or other
gcatccwggnnnnn

SEQ ID NO: 383 - DNA, 18 bp, Artificial Sequence
  source: /note="Description of Artificial Sequence: Synthetic oligonucleotide"
  modified_base (10)..(18): a, c, t, g, unknown or other
gccggcatcnnnnnnnnn

SEQ ID NO: 384 - DNA, 14 bp, Artificial Sequence
  source: /note="Description of Artificial Sequence: Synthetic oligonucleotide"
  modified_base (8)..(14): a, c, t, g, unknown or other
gcatcgannnnnnn

SEQ ID NO: 385 - DNA, 15 bp, Artificial Sequence
  source: /note="Description of Artificial Sequence: Synthetic oligonucleotide"
  modified_base (7)..(15): a, c, t, g, unknown or other
tgcatcnnnnnnnnn

SEQ ID NO: 386 - DNA, 18 bp, Artificial Sequence
  source: /note="Description of Artificial Sequence: Synthetic oligonucleotide"
  modified_base (3)..(3): a, c, t, g, unknown or other
  modified_base (10)..(18): a, c, t, g, unknown or other
ctnagcatcnnnnnnnnn

SEQ ID NO: 387 - DNA, 14 bp, Artificial Sequence
  source: /note="Description of Artificial Sequence: Synthetic oligonucleotide"
  modified_base (7)..(7): a, c, t, g, unknown or other
  modified_base (10)..(14): a, c, t, g, unknown or other
gcatctnagnnnnn

SEQ ID NO: 388 - DNA, 17 bp, Artificial Sequence
  source: /note="Description of Artificial Sequence: Synthetic oligonucleotide"
  modified_base (9)..(17): a, c, t, g, unknown or other
catgcatcnnnnnnnnn

SEQ ID NO: 389 - DNA, 14 bp, Artificial Sequence
  source: /note="Description of Artificial Sequence: Synthetic oligonucleotide"
  modified_base (9)..(14): a, c, t, g, unknown or other
gcatcatgnnnnnn

SEQ ID NO: 390 - DNA, 17 bp, Artificial Sequence
  source: /note="Description of Artificial Sequence: Synthetic oligonucleotide"
  modified_base (9)..(17): a, c, t, g, unknown or other
cgcgcatcnnnnnnnnn

SEQ ID NO: 391 - DNA, 14 bp, Artificial Sequence
  source: /note="Description of Artificial Sequence: Synthetic oligonucleotide"
  modified_base (9)..(14): a, c, t, g, unknown or other
gcatcgcgnnnnnn

SEQ ID NO: 392 - DNA, 17 bp, Artificial Sequence
  source: /note="Description of Artificial Sequence: Synthetic oligonucleotide"
  modified_base (9)..(17): a, c, t, g, unknown or other
ccggcatcnnnnnnnnn

SEQ ID NO: 393 - DNA, 14 bp, Artificial Sequence
  source: /note="Description of Artificial Sequence: Synthetic oligonucleotide"
  modified_base (9)..(14): a, c, t, g, unknown or other
gcatccggnnnnnn

SEQ ID NO: 394 - DNA, 16 bp, Artificial Sequence
  source: /note="Description of Artificial Sequence: Synthetic oligonucleotide"
  modified_base (8)..(16): a, c, t, g, unknown or other
gcgcatcnnnnnnnnn

SEQ ID NO: 395 - DNA, 14 bp, Artificial Sequence
  source: /note="Description of Artificial Sequence: Synthetic oligonucleotide"
  modified_base (10)..(14): a, c, t, g, unknown or other
gcatcgcgannnnn

SEQ ID NO: 396 - DNA, 18 bp, Artificial Sequence
  source: /note="Description of Artificial Sequence: Synthetic oligonucleotide"
  modified_base (10)..(18): a, c, t, g, unknown or other
mgcwgcatcnnnnnnnnn

SEQ ID NO: 397 - DNA, 14 bp, Artificial Sequence
  source: /note="Description of Artificial Sequence: Synthetic oligonucleotide"
  modified_base (6)..(6): a, c, t, g, unknown or other
  modified_base (9)..(14): a, c, t, g, unknown or other
gcatcngannnnnn

SEQ ID NO: 398 - DNA, 14 bp, Artificial Sequence
  source: /note="Description of Artificial Sequence: Synthetic oligonucleotide"
  modified_base (6)..(7): a, c, t, g, unknown or other
  modified_base (10)..(14): a, c, t, g, unknown or other
gcatcnngannnnn

SEQ ID NO: 399 - DNA, 18 bp, Artificial Sequence
  source: /note="Description of Artificial Sequence: Synthetic oligonucleotide"
  modified_base (3)..(3): a, c, t, g, unknown or other
  modified_base (10)..(18): a, c, t, g, unknown or other
ctnagcatcnnnnnnnnn

SEQ ID NO: 400 - DNA, 14 bp, Artificial Sequence
  source: /note="Description of Artificial Sequence: Synthetic oligonucleotide"
  modified_base (7)..(7): a, c, t, g, unknown or other
  modified_base (10)..(14): a, c, t, g, unknown or other
gcatctnagnnnnn

SEQ ID NO: 401 - DNA, 19 bp, Artificial Sequence
  source: /note="Description of Artificial Sequence: Synthetic oligonucleotide"
  modified_base (3)..(4): a, c, t, g, unknown or other
  modified_base (11)..(19): a, c, t, g, unknown or other
ccnnggcatcnnnnnnnnn

SEQ ID NO: 402 - DNA, 14 bp, Artificial Sequence
  source: /note="Description of Artificial Sequence: Synthetic oligonucleotide"
  modified_base (7)..(8): a, c, t, g, unknown or other
  modified_base (11)..(14): a, c, t, g, unknown or other
gcatccnnggnnnn

SEQ ID NO: 403 - DNA, 14 bp, Artificial Sequence
  source: /note="Description of Artificial Sequence: Synthetic oligonucleotide"
  modified_base (9)..(14): a, c, t, g, unknown or other
gcatcctcnnnnnn

SEQ ID NO: 404 - DNA, 17 bp, Artificial Sequence
  source: /note="Description of Artificial Sequence: Synthetic oligonucleotide"
  modified_base (9)..(17): a, c, t, g, unknown or other
gaggcatcnnnnnnnnn

SEQ ID NO: 405 - DNA, 14 bp, Artificial Sequence
  source: /note="Description of Artificial Sequence: Synthetic oligonucleotide"
  modified_base (9)..(14): a, c, t, g, unknown or other
gcatcwccnnnnnn

SEQ ID NO: 406 - DNA, 14 bp, Artificial Sequence
  source: /note="Description of Artificial Sequence: Synthetic oligonucleotide"
  modified_base (10)..(14): a, c, t, g, unknown or other
gcatcctggnnnnn

SEQ ID NO: 407 - DNA, 18 bp, Artificial Sequence
  source: /note="Description of Artificial Sequence: Synthetic oligonucleotide"
  modified_base (10)..(18): a, c, t, g, unknown or other
ccaggcatcnnnnnnnnn

SEQ ID NO: 408 - DNA, 18 bp, Artificial Sequence
  source: /note="Description of Artificial Sequence: Synthetic oligonucleotide"
  modified_base (10)..(18): a, c, t, g, unknown or other
ccwggcatcnnnnnnnnn

SEQ ID NO: 409 - DNA, 14 bp, Artificial Sequence
  source: /note="Description of Artificial Sequence: Synthetic oligonucleotide"
  modified_base (10)..(14): a, c, t, g, unknown or other
gcatccwggnnnnn

SEQ ID NO: 410 - DNA, 18 bp, Artificial Sequence
  source: /note="Description of Artificial Sequence: Synthetic oligonucleotide"
  modified_base (10)..(18): a, c, t, g, unknown or other
gctagcatcnnnnnnnnn

SEQ ID NO: 411 - DNA, 14 bp, Artificial Sequence
  source: /note="Description of Artificial Sequence: Synthetic oligonucleotide"
  modified_base (9)..(14): a, c, t, g, unknown or other
gcatctggnnnnnn

SEQ ID NO: 412 - DNA, 18 bp, Artificial Sequence
  source: /note="Description of Artificial Sequence: Synthetic oligonucleotide"
  modified_base (10)..(18): a, c, t, g, unknown or other
gcgcgcatcnnnnnnnnn

SEQ ID NO: 413 - DNA, 18 bp, Artificial Sequence
  source: /note="Description of Artificial Sequence: Synthetic oligonucleotide"
  modified_base (10)..(18): a, c, t, g, unknown or other
vccggcatcnnnnnnnnn

SEQ ID NO: 414 - DNA, 18 bp, Artificial Sequence
  source: /note="Description of Artificial Sequence: Synthetic oligonucleotide"
  modified_base (10)..(18): a, c, t, g, unknown or other
tctggcatcnnnnnnnnn

SEQ ID NO: 415 - DNA, 14 bp, Artificial Sequence
  source: /note="Description of Artificial Sequence: Synthetic oligonucleotide"
  modified_base (10)..(14): a, c, t, g, unknown or other
gcatccagannnnn

SEQ ID NO: 416 - DNA, 19 bp, Artificial Sequence
  source: /note="Description of Artificial Sequence: Synthetic oligonucleotide"
  modified_base (11)..(19): a, c, t, g, unknown or other
ctcgagcatcnnnnnnnnn

SEQ ID NO: 417 - DNA, 14 bp, Artificial Sequence
  source: /note="Description of Artificial Sequence: Synthetic oligonucleotide"
  modified_base (11)..(14): a, c, t, g, unknown or other
gcatctcgagnnnn

SEQ ID NO: 418 - DNA, 18 bp, Artificial Sequence
  source: /note="Description of Artificial Sequence: Synthetic oligonucleotide"
  modified_base (10)..(18): a, c, t, g, unknown or other
rcatgcatcnnnnnnnnn

SEQ ID NO: 419 - DNA, 19 bp, Artificial Sequence
  source: /note="Description of Artificial Sequence: Synthetic oligonucleotide"
  modified_base (11)..(19): a, c, t, g, unknown or other
ccatggcatcnnnnnnnnn

SEQ ID NO: 420 - DNA, 14 bp, Artificial Sequence
  source: /note="Description of Artificial Sequence: Synthetic oligonucleotide"
  modified_base (11)..(14): a, c, t, g, unknown or other
gcatccatggnnnn

SEQ ID NO: 421 - DNA, 19 bp, Artificial Sequence
  source: /note="Description of Artificial Sequence: Synthetic oligonucleotide"
  modified_base (11)..(19): a, c, t, g, unknown or other
cgatcgcatcnnnnnnnnn

SEQ ID NO: 422 - DNA, 14 bp, Artificial Sequence
  source: /note="Description of Artificial Sequence: Synthetic oligonucleotide"
  modified_base (11)..(14): a, c, t, g, unknown or other
gcatcgatcgnnnn

SEQ ID NO: 423 - DNA, 17 bp, Artificial Sequence
  source: /note="Description of Artificial Sequence: Synthetic oligonucleotide"
  modified_base (9)..(17): a, c, t, g, unknown or other
ctagcatcnnnnnnnnn

SEQ ID NO: 424 - DNA, 14 bp, Artificial Sequence
  source: /note="Description of Artificial Sequence: Synthetic oligonucleotide"
  modified_base (9)..(14): a, c, t, g, unknown or other
gcatctagnnnnnn

SEQ ID NO: 425 - DNA, 19 bp, Artificial Sequence
  source: /note="Description of Artificial Sequence: Synthetic oligonucleotide"
  modified_base (11)..(19): a, c, t, g, unknown or other
ccatggcatcnnnnnnnnn

SEQ ID NO: 426 - DNA, 14 bp, Artificial Sequence
  source: /note="Description of Artificial Sequence: Synthetic oligonucleotide"
  modified_base (11)..(14): a, c, t, g, unknown or other
gcatccatggnnnn

SEQ ID NO: 427 - DNA, 19 bp, Artificial Sequence
  source: /note="Description of Artificial Sequence: Synthetic oligonucleotide"
  modified_base (11)..(19): a, c, t, g, unknown or other
ccwwggcatcnnnnnnnnn

SEQ ID NO: 428 - DNA, 14 bp, Artificial Sequence
  source: /note="Description of Artificial Sequence: Synthetic oligonucleotide"
  modified_base (11)..(14): a, c, t, g, unknown or other
gcatccwwggnnnn

SEQ ID NO: 429 - DNA, 14 bp, Artificial Sequence
  source: /note="Description of Artificial Sequence: Synthetic oligonucleotide"
  modified_base (10)..(14): a, c, t, g, unknown or other
gcatctagannnnn

SEQ ID NO: 430 - DNA, 14 bp, Artificial Sequence
  source: /note="Description of Artificial Sequence: Synthetic oligonucleotide"
  modified_base (6)..(7): a, c, t, g, unknown or other
  modified_base (11)..(14): a, c, t, g, unknown or other
gcatcnngtcnnnn

SEQ ID NO: 431 - DNA, 19 bp, Artificial Sequence
  source: /note="Description of Artificial Sequence: Synthetic oligonucleotide"
  modified_base (11)..(19): a, c, t, g, unknown or other
gaagagcatcnnnnnnnnn

SEQ ID NO: 432 - DNA, 14 bp, Artificial Sequence
  source: /note="Description of Artificial Sequence: Synthetic oligonucleotide"
  modified_base (11)..(14): a, c, t, g, unknown or other
gcatctcttcnnnn

SEQ ID NO: 433 - DNA, 18 bp, Artificial Sequence
  source: /note="Description of Artificial Sequence: Synthetic oligonucleotide"
  modified_base (10)..(18): a, c, t, g, unknown or other
castgcatcnnnnnnnnn

SEQ ID NO: 434 - DNA, 14 bp, Artificial Sequence
  source: /note="Description of Artificial Sequence: Synthetic oligonucleotide"
  modified_base (10)..(14): a, c, t, g, unknown or other
gcatcastgnnnnn

SEQ ID NO: 435 - DNA, 18 bp, Artificial Sequence
  source: /note="Description of Artificial Sequence: Synthetic oligonucleotide"
  modified_base (10)..(18): a, c, t, g, unknown or other
gcgcgcatcnnnnnnnnn

SEQ ID NO: 436 - DNA, 18 bp, Artificial Sequence
  source: /note="Description of Artificial Sequence: Synthetic oligonucleotide"
  modified_base (10)..(18): a, c, t, g, unknown or other
actggcatcnnnnnnnnn

SEQ ID NO: 437 - DNA, 14 bp, Artificial Sequence
  source: /note="Description of Artificial Sequence: Synthetic oligonucleotide"
  modified_base (10)..(14): a, c, t, g, unknown or other
gcatccagtnnnnn

SEQ ID NO: 438 - DNA, 17 bp, Artificial Sequence
  source: /note="Description of Artificial Sequence: Synthetic oligonucleotide"
  modified_base (9)..(17): a, c, t, g, unknown or other
gcggcatcnnnnnnnnn

SEQ ID NO: 439 - DNA, 14 bp, Artificial Sequence
  source: /note="Description of Artificial Sequence: Synthetic oligonucleotide"
  modified_base (9)..(14): a, c, t, g, unknown or other
gcatccgcnnnnnn

SEQ ID NO: 440 - DNA, 14 bp, Artificial Sequence
  source: /note="Description of Artificial Sequence: Synthetic oligonucleotide"
  modified_base (7)..(14): a, c, t, g, unknown or other
gcatccnnnnnnnn

SEQ ID NO: 441 - DNA, 17 bp, Artificial Sequence
  source: /note="Description of Artificial Sequence: Synthetic oligonucleotide"
  modified_base (9)..(17): a, c, t, g, unknown or other
gacgcatcnnnnnnnnn

SEQ ID NO: 442 - DNA, 14 bp, Artificial Sequence
  source: /note="Description of Artificial Sequence: Synthetic oligonucleotide"
  modified_base (9)..(14): a, c, t, g, unknown or other
gcatcaccnnnnnn

SEQ ID NO: 443 - DNA, 14 bp, Artificial Sequence
  source: /note="Description of Artificial Sequence: Synthetic oligonucleotide"
  modified_base (9)..(14): a, c, t, g, unknown or other
gcatcyycnnnnnn

SEQ ID NO: 444 - DNA, 14 bp, Artificial Sequence
  source: /note="Description of Artificial Sequence: Synthetic oligonucleotide"
  modified_base (9)..(14): a, c, t, g, unknown or other
gcatcttcnnnnnn

SEQ ID NO: 445 - DNA, 14 bp, Artificial Sequence
  source: /note="Description of Artificial Sequence: Synthetic oligonucleotide"
  modified_base (10)..(14): a, c, t, g, unknown or other
gcatccttcnnnnn

SEQ ID NO: 446 - DNA, 18 bp, Artificial Sequence
  source: /note="Description of Artificial Sequence: Synthetic oligonucleotide"
  modified_base (10)..(18): a, c, t, g, unknown or other
gaaggcatcnnnnnnnnn

SEQ ID NO: 447 - DNA, 19 bp, Artificial Sequence
  source: /note="Description of Artificial Sequence: Synthetic oligonucleotide"
  modified_base (11)..(19): a, c, t, g, unknown or other
gaagagcatcnnnnnnnnn

SEQ ID NO: 448 - DNA, 17 bp, Artificial Sequence
  source: /note="Description of Artificial Sequence: Synthetic oligonucleotide"
  modified_base (9)..(17): a, c, t, g, unknown or other
acggcatcnnnnnnnnn

SEQ ID NO: 449 - DNA, 14 bp, Artificial Sequence
  source: /note="Description of Artificial Sequence: Synthetic oligonucleotide"
  modified_base (7)..(14): a, c, t, g, unknown or other
gcatccnnnnnnnn

SEQ ID NO: 450 - DNA, 14 bp, Artificial Sequence
  source: /note="Description of Artificial Sequence: Synthetic oligonucleotide"
  modified_base (9)..(14): a, c, t, g, unknown or other
gcatcaccnnnnnn

SEQ ID NO: 451 - DNA, 14 bp, Artificial Sequence
  source: /note="Description of Artificial Sequence: Synthetic oligonucleotide"
  modified_base (9)..(14): a, c, t, g, unknown or other
gcatcttcnnnnnn

SEQ ID NO: 452 - DNA, 14 bp, Artificial Sequence
  source: /note="Description of Artificial Sequence: Synthetic oligonucleotide"
  modified_base (9)..(14): a, c, t, g, unknown or other
gcatcctcnnnnnn

SEQ ID NO: 453 - DNA, 17 bp, Artificial Sequence
  source: /note="Description of Artificial Sequence: Synthetic oligonucleotide"
  modified_base (9)..(17): a, c, t, g, unknown or other
gaggcatcnnnnnnnnn

SEQ ID NO: 454 - DNA, 14 bp, Artificial Sequence
  source: /note="Description of Artificial Sequence: Synthetic oligonucleotide"
  modified_base (7)..(14): a, c, t, g, unknown or other
gcatccnnnnnnnn

SEQ ID NO: 455 - DNA, 19 bp, Artificial Sequence
  source: /note="Description of Artificial Sequence: Synthetic oligonucleotide"
  modified_base (9)..(19): a, c, t, g, unknown or other
gggacgtcnnnnnnnnnnn

SEQ ID NO: 456 - DNA, 23 bp, Artificial Sequence
  source: /note="Description of Artificial Sequence: Synthetic oligonucleotide"
  modified_base (10)..(23): a, c, t, g, unknown or other
ccwggggacnnnnnnnnnnnnnn

SEQ ID NO: 457 - DNA, 22 bp, Artificial Sequence
  source: /note="Description of Artificial Sequence: Synthetic oligonucleotide"
  modified_base (9)..(22): a, c, t, g, unknown or other
ccwgggacnnnnnnnnnnnnnn

SEQ ID NO: 458 - DNA, 19 bp, Artificial Sequence
  source: /note="Description of Artificial Sequence: Synthetic oligonucleotide"
  modified_base (10)..(19): a, c, t, g, unknown or other
gggaccwggnnnnnnnnnn

SEQ ID NO: 459 - DNA, 19 bp, Artificial Sequence
  source: /note="Description of Artificial Sequence: Synthetic oligonucleotide"
  modified_base (8)..(19): a, c, t, g, unknown or other
gggactcnnnnnnnnnnnn

SEQ ID NO: 460 - DNA, 22 bp, Artificial Sequence
  source: /note="Description of Artificial Sequence: Synthetic oligonucleotide"
  modified_base (9)..(22): a, c, t, g, unknown or other
gcggggacnnnnnnnnnnnnnn

SEQ ID NO: 461 - DNA, 21 bp, Artificial Sequence
  source: /note="Description of Artificial Sequence: Synthetic oligonucleotide"
  modified_base (8)..(21): a, c, t, g, unknown or other
gcgggacnnnnnnnnnnnnnn

SEQ ID NO: 462 - DNA, 19 bp, Artificial Sequence
  source: /note="Description of Artificial Sequence: Synthetic oligonucleotide"
  modified_base (9)..(19): a, c, t, g, unknown or other
gggaccgcnnnnnnnnnnn

SEQ ID NO: 463 - DNA, 19 bp, Artificial Sequence
  source: /note="Description of Artificial Sequence: Synthetic oligonucleotide"
  modified_base (10)..(19): a, c, t, g, unknown or other
gggacrygtnnnnnnnnnn

SEQ ID NO: 464 - DNA, 19 bp, Artificial Sequence
  source: /note="Description of Artificial Sequence: Synthetic oligonucleotide"
  modified_base (6)..(10): a, c, t, g, unknown or other
  modified_base (14)..(19): a, c, t, g, unknown or other
gggacnnnnngtcnnnnnn

SEQ ID NO: 465 - DNA, 24 bp, Artificial Sequence
  source: /note="Description of Artificial Sequence: Synthetic oligonucleotide"
  modified_base (11)..(24): a, c, t, g, unknown or other
cggccgggacnnnnnnnnnnnnnn

SEQ ID NO: 466 - DNA, 19 bp, Artificial Sequence
  source: /note="Description of Artificial Sequence: Synthetic oligonucleotide"
  modified_base (11)..(19): a, c, t, g, unknown or other
gggacggccgnnnnnnnnn

SEQ ID NO: 467 - DNA, 24 bp, Artificial Sequence
  source: /note="Description of Artificial Sequence: Synthetic oligonucleotide"
  modified_base (11)..(24): a, c, t, g, unknown or other
cycgrgggacnnnnnnnnnnnnnn

SEQ ID NO: 468 - DNA, 23 bp, Artificial Sequence
  source: /note="Description of Artificial Sequence: Synthetic oligonucleotide"
  modified_base (10)..(23): a, c, t, g, unknown or other
cycggggacnnnnnnnnnnnnnn

SEQ ID NO: 469 - DNA, 22 bp, Artificial Sequence
  source: /note="Description of Artificial Sequence: Synthetic oligonucleotide"
  modified_base (9)..(22): a, c, t, g, unknown or other
cycgggacnnnnnnnnnnnnnn

SEQ ID NO: 470 - DNA, 19 bp, Artificial Sequence
  source: /note="Description of Artificial Sequence: Synthetic oligonucleotide"
  modified_base (11)..(19): a, c, t, g, unknown or other
gggacycgrgnnnnnnnnn

SEQ ID NO: 471 - DNA, 22 bp, Artificial Sequence
  source: /note="Description of Artificial Sequence: Synthetic oligonucleotide"
  modified_base (9)..(22): a, c, t, g, unknown or other
ccwgggacnnnnnnnnnnnnnn

SEQ ID NO: 472 - DNA, 19 bp, Artificial Sequence
  source: /note="Description of Artificial Sequence: Synthetic oligonucleotide"
  modified_base (10)..(19): a, c, t, g, unknown or other
gggaccggynnnnnnnnnn

SEQ ID NO: 473 - DNA, 19 bp, Artificial Sequence
  source: /note="Description of Artificial Sequence: Synthetic oligonucleotide"
  modified_base (7)..(19): a, c, t, g, unknown or other
gggaccnnnnnnnnnnnnn

SEQ ID NO: 474 - DNA, 19 bp, Artificial Sequence
  source: /note="Description of Artificial Sequence: Synthetic oligonucleotide"
  modified_base (7)..(19): a, c, t, g, unknown or other
gggaccnnnnnnnnnnnnn

SEQ ID NO: 475 - DNA, 24 bp, Artificial Sequence
  source: /note="Description of Artificial Sequence: Synthetic oligonucleotide"
  modified_base (11)..(24): a, c, t, g, unknown or other
ctcgagggacnnnnnnnnnnnnnn

SEQ ID NO: 476 - DNA, 19 bp, Artificial Sequence
  source: /note="Description of Artificial Sequence: Synthetic oligonucleotide"
  modified_base (11)..(19): a, c, t, g, unknown or other
gggactcgagnnnnnnnnn

SEQ ID NO: 477 - DNA, 22 bp, Artificial Sequence
  source: /note="Description of Artificial Sequence: Synthetic oligonucleotide"
  modified_base (9)..(22): a, c, t, g, unknown or other
cgcgggacnnnnnnnnnnnnnn

SEQ ID NO: 478 - DNA, 19 bp, Artificial Sequence
  source: /note="Description of Artificial Sequence: Synthetic oligonucleotide"
  modified_base (9)..(19): a, c, t, g, unknown or other
gggacgcgnnnnnnnnnnn

SEQ ID NO: 479 - DNA, 22 bp, Artificial Sequence
  source: /note="Description of Artificial Sequence: Synthetic oligonucleotide"
  modified_base (9)..(22): a, c, t, g, unknown or other
ccwgggacnnnnnnnnnnnnnn

SEQ ID NO: 480 - DNA, 24 bp, Artificial Sequence
  source: /note="Description of Artificial Sequence: Synthetic oligonucleotide"
  modified_base (11)..(24): a, c, t, g, unknown or other
cycgrgggacnnnnnnnnnnnnnn

SEQ ID NO: 481 - DNA, 23 bp, Artificial Sequence
  source: /note="Description of Artificial Sequence: Synthetic oligonucleotide"
  modified_base (10)..(23): a, c, t, g, unknown or other
cycggggacnnnnnnnnnnnnnn

SEQ ID NO: 482 - DNA, 22 bp, Artificial Sequence
  source: /note="Description of Artificial Sequence: Synthetic oligonucleotide"
  modified_base (9)..(22): a, c, t, g, unknown or other
cycgggacnnnnnnnnnnnnnn

SEQ ID NO: 483 - DNA, 19 bp, Artificial Sequence
  source: /note="Description of Artificial Sequence: Synthetic oligonucleotide"
  modified_base (11)..(19): a, c, t, g, unknown or other
gggacycgrgnnnnnnnnn

SEQ ID NO: 484 - DNA, 22 bp, Artificial Sequence
  source: /note="Description of Artificial Sequence: Synthetic oligonucleotide"
  modified_base (9)..(22): a, c, t, g, unknown or other
ccggggacnnnnnnnnnnnnnn

SEQ ID NO: 485 - DNA, 21 bp, Artificial Sequence
  source: /note="Description of Artificial Sequence: Synthetic oligonucleotide"
  modified_base (8)..(21): a, c, t, g, unknown or other
ccgggacnnnnnnnnnnnnnn

SEQ ID NO: 486 - DNA, 19 bp, Artificial Sequence
  source: /note="Description of Artificial Sequence: Synthetic oligonucleotide"
  modified_base (9)..(19): a, c, t, g, unknown or other
gggaccggnnnnnnnnnnn

SEQ ID NO: 487 - DNA, 22 bp, Artificial Sequence
  source: /note="Description of Artificial Sequence: Synthetic oligonucleotide"
  modified_base (9)..(22): a, c, t, g, unknown or other
ctagggacnnnnnnnnnnnnnn

SEQ ID NO: 488 - DNA, 19 bp, Artificial Sequence
  source: /note="Description of Artificial Sequence: Synthetic oligonucleotide"
  modified_base (9)..(19): a, c, t, g, unknown or other
gggactagnnnnnnnnnnn

SEQ ID NO: 489 - DNA, 19 bp, Artificial Sequence
  source: /note="Description of Artificial Sequence: Synthetic oligonucleotide"
  modified_base (10)..(19): a, c, t, g, unknown or other
gggacgcgtnnnnnnnnnn

SEQ ID NO: 490 - DNA, 23 bp, Artificial Sequence
  source: /note="Description of Artificial Sequence: Synthetic oligonucleotide"
  modified_base (10)..(23): a, c, t, g, unknown or other
ccssgggacnnnnnnnnnnnnnn

SEQ ID NO: 491 - DNA, 22 bp, Artificial Sequence
  source: /note="Description of Artificial Sequence: Synthetic oligonucleotide"
  modified_base (9)..(22): a, c, t, g, unknown or other
ccsgggacnnnnnnnnnnnnnn

SEQ ID NO: 492 - DNA, 23 bp, Artificial Sequence
  source: /note="Description of Artificial Sequence: Synthetic oligonucleotide"
  modified_base (10)..(23): a, c, t, g, unknown or other
cccggggacnnnnnnnnnnnnnn

SEQ ID NO: 493 - DNA, 22 bp, Artificial Sequence
  source: /note="Description of Artificial Sequence: Synthetic oligonucleotide"
  modified_base (9)..(22): a, c, t, g, unknown or other
cccgggacnnnnnnnnnnnnnn

SEQ ID NO: 494 - DNA, 24 bp, Artificial Sequence
  source: /note="Description of Artificial Sequence: Synthetic oligonucleotide"
  modified_base (11)..(24): a, c, t, g, unknown or other
ccwwggggacnnnnnnnnnnnnnn

SEQ ID NO: 495 - DNA, 23 bp, Artificial Sequence
  source: /note="Description of Artificial Sequence: Synthetic oligonucleotide"
  modified_base (10)..(23): a, c, t, g, unknown or other
ccwwgggacnnnnnnnnnnnnnn

SEQ ID NO: 496 - DNA, 19 bp, Artificial Sequence
  source: /note="Description of Artificial Sequence: Synthetic oligonucleotide"
  modified_base (11)..(19): a, c, t, g, unknown or other
gggaccwwggnnnnnnnnn

SEQ ID NO: 497 - DNA, 23 bp, Artificial Sequence
  source: /note="Description of Artificial Sequence: Synthetic oligonucleotide"
  modified_base (10)..(23): a, c, t, g, unknown or other
ccwggggacnnnnnnnnnnnnnn

SEQ ID NO: 498 - DNA, 22 bp, Artificial Sequence
  source: /note="Description of Artificial Sequence: Synthetic oligonucleotide"
  modified_base (9)..(22): a, c, t, g, unknown or other
ccwgggacnnnnnnnnnnnnnn

SEQ ID NO: 499 - DNA, 19 bp, Artificial Sequence
  source: /note="Description of Artificial Sequence: Synthetic oligonucleotide"
  modified_base (10)..(19): a, c, t, g, unknown or other
gggaccwggnnnnnnnnnn

SEQ ID NO: 500 - DNA, 19 bp, Artificial Sequence
  source: /note="Description of Artificial Sequence: Synthetic oligonucleotide"
  modified_base (7)..(19): a, c, t, g, unknown or other
gggaccnnnnnnnnnnnnn

SEQ ID NO: 501 - DNA, 22 bp, Artificial Sequence
  source: /note="Description of Artificial Sequence: Synthetic oligonucleotide"
  modified_base (9)..(22): a, c, t, g, unknown or other
ccwgggacnnnnnnnnnnnnnn

SEQ ID NO: 502 - DNA, 23 bp, Artificial Sequence
  source: /note="Description of Artificial Sequence: Synthetic oligonucleotide"
  modified_base (3)..(3): a, c, t, g, unknown or other
  modified_base (10)..(23): a, c, t, g, unknown or other
ctnagggacnnnnnnnnnnnnnn

SEQ ID NO: 503 - DNA, 19 bp, Artificial Sequence
  source: /note="Description of Artificial Sequence: Synthetic oligonucleotide"
  modified_base (7)..(7): a, c, t, g, unknown or other
  modified_base (10)..(19): a, c, t, g, unknown or other
gggactnagnnnnnnnnnn

SEQ ID NO: 504 - DNA, 22 bp, Artificial Sequence
  source: /note="Description of Artificial Sequence: Synthetic oligonucleotide"
  modified_base (3)..(3): a, c, t, g, unknown or other
  modified_base (9)..(22): a, c, t, g, unknown or other
ccngggacnnnnnnnnnnnnnn

SEQ ID NO: 505 - DNA, 21 bp, Artificial Sequence
  source: /note="Description of Artificial Sequence: Synthetic oligonucleotide"
  modified_base (8)..(21): a, c, t, g, unknown or other
ccgggacnnnnnnnnnnnnnn

SEQ ID NO: 506 - DNA, 23 bp, Artificial Sequence
  source: /note="Description of Artificial Sequence: Synthetic oligonucleotide"
  modified_base (10)..(23): a, c, t, g, unknown or other
ccgcgggacnnnnnnnnnnnnnn

SEQ ID NO: 507 - DNA, 28 bp, Artificial Sequence
  source: /note="Description of Artificial Sequence: Synthetic oligonucleotide"
  modified_base (4)..(8): a, c, t, g, unknown or other
  modified_base (15)..(28): a, c, t, g, unknown or other
cctnnnnnagggacnnnnnnnnnnnnnn

SEQ ID NO: 508 - DNA, 19 bp, Artificial Sequence
  source: /note="Description of Artificial Sequence: Synthetic oligonucleotide"
  modified_base (8)..(19): a, c, t, g, unknown or other
gggaccynnnnnnnnnnnn

SEQ ID NO: 509 - DNA, 21 bp, Artificial Sequence
  source: /note="Description of Artificial Sequence: Synthetic oligonucleotide"
  modified_base (8)..(21): a, c, t, g, unknown or other
ccgggacnnnnnnnnnnnnnn

SEQ ID NO: 510 - DNA, 22 bp, Artificial Sequence
  source: /note="Description of Artificial Sequence: Synthetic oligonucleotide"
  modified_base (9)..(22): a, c, t, g, unknown or other
catgggacnnnnnnnnnnnnnn

SEQ ID NO: 511 - DNA, 19 bp, Artificial Sequence
  source: /note="Description of Artificial Sequence: Synthetic oligonucleotide"
  modified_base (9)..(19): a, c, t, g, unknown or other
gggacatgnnnnnnnnnnn

SEQ ID NO: 512 - DNA, 22 bp, Artificial Sequence
  source: /note="Description of Artificial Sequence: Synthetic oligonucleotide"
  modified_base (9)..(22): a, c, t, g, unknown or other
cgcgggacnnnnnnnnnnnnnn

SEQ ID NO: 513 - DNA, 19 bp, Artificial Sequence
  source: /note="Description of Artificial Sequence: Synthetic oligonucleotide"
  modified_base (9)..(19): a, c, t, g, unknown or other
gggacgcgnnnnnnnnnnn

SEQ ID NO: 514 - DNA, 22 bp, Artificial Sequence
  source: /note="Description of Artificial Sequence: Synthetic oligonucleotide"
  modified_base (9)..(22): a, c, t, g, unknown or other
ccggggacnnnnnnnnnnnnnn

SEQ ID NO: 515 - DNA, 21 bp, Artificial Sequence
  source: /note="Description of Artificial Sequence: Synthetic oligonucleotide"
  modified_base (8)..(21): a, c, t, g, unknown or other
ccgggacnnnnnnnnnnnnnn

SEQ ID NO: 516 - DNA, 19 bp, Artificial Sequence
  source: /note="Description of Artificial Sequence: Synthetic oligonucleotide"
  modified_base (9)..(19): a, c, t, g, unknown or other
gggaccggnnnnnnnnnnn

SEQ ID NO: 517 - DNA, 21 bp, Artificial Sequence
  source: /note="Description of Artificial Sequence: Synthetic oligonucleotide"
  modified_base (8)..(21): a, c, t, g, unknown or other
ccgggacnnnnnnnnnnnnnn

SEQ ID NO: 518 - DNA, 21 bp, Artificial Sequence
  source: /note="Description of Artificial Sequence: Synthetic oligonucleotide"
  modified_base (8)..(21): a, c, t, g, unknown or other
ctgggacnnnnnnnnnnnnnn

SEQ ID NO: 519 - DNA, 19 bp, Artificial Sequence
  source: /note="Description of Artificial Sequence: Synthetic oligonucleotide"
  modified_base (6)..(8): a, c, t, g, unknown or other
  modified_base (12)..(19): a, c, t, g, unknown or other
gggacnnngtcnnnnnnnn

SEQ ID NO: 520 - DNA, 19 bp, Artificial Sequence
  source: /note="Description of Artificial Sequence: Synthetic oligonucleotide"
  modified_base (6)..(6): a, c, t, g, unknown or other
  modified_base (9)..(19): a, c, t, g, unknown or other
gggacngtnnnnnnnnnnn

SEQ ID NO: 521 - DNA, 21 bp, Artificial Sequence
  source: /note="Description of Artificial Sequence: Synthetic oligonucleotide"
  modified_base (8)..(21): a, c, t, g, unknown or other
tcgggacnnnnnnnnnnnnnn

SEQ ID NO: 522 - DNA, 23 bp, Artificial Sequence
  source: /note="Description of Artificial Sequence: Synthetic oligonucleotide"
  modified_base (3)..(3): a, c, t, g, unknown or other
  modified_base (10)..(23): a, c, t, g, unknown or other
ctnagggacnnnnnnnnnnnnnn

SEQ ID NO: 523 - DNA, 19 bp, Artificial Sequence
  source: /note="Description of Artificial Sequence: Synthetic oligonucleotide"
  modified_base (7)..(7): a, c, t, g, unknown or other
  modified_base (10)..(19): a, c, t, g, unknown or other
gggactnagnnnnnnnnnn

SEQ ID NO: 524 - DNA, 24 bp, Artificial Sequence
  source: /note="Description of Artificial Sequence: Synthetic oligonucleotide"
  modified_base (3)..(4): a, c, t, g, unknown or other
  modified_base (11)..(24): a, c, t, g, unknown or other
ccnnggggacnnnnnnnnnnnnnn

SEQ ID NO: 525 - DNA, 23 bp, Artificial Sequence
  source: /note="Description of Artificial Sequence: Synthetic oligonucleotide"
  modified_base (3)..(4): a, c, t, g, unknown or other
  modified_base (10)..(23): a, c, t, g, unknown or other
ccnngggacnnnnnnnnnnnnnn

SEQ ID NO: 526 - DNA, 22 bp, Artificial Sequence
  source: /note="Description of Artificial Sequence: Synthetic oligonucleotide"
  modified_base (3)..(3): a, c, t, g, unknown or other
  modified_base (9)..(22): a, c, t, g, unknown or other
ccngggacnnnnnnnnnnnnnn

SEQ ID NO: 527 - DNA, 19 bp, Artificial Sequence
  source: /note="Description of Artificial Sequence: Synthetic oligonucleotide"
  modified_base (7)..(8): a, c, t, g, unknown or other
  modified_base (11)..(19): a, c, t, g, unknown or other
gggaccnnggnnnnnnnnn

SEQ ID NO: 528 - DNA, 19 bp, Artificial Sequence
  source: /note="Description of Artificial Sequence: Synthetic oligonucleotide"
  modified_base (8)..(19): a, c, t, g, unknown or other
gggacgtnnnnnnnnnnnn

SEQ ID NO: 529 - DNA, 22 bp, Artificial Sequence
  source: /note="Description of Artificial Sequence: Synthetic oligonucleotide"
  modified_base (9)..(22): a, c, t, g, unknown or other
gaagggacnnnnnnnnnnnnnn

SEQ ID NO: 530 - DNA, 19 bp, Artificial Sequence
  source: /note="Description of Artificial Sequence: Synthetic oligonucleotide"
  modified_base (9)..(19): a, c, t, g, unknown or other
gggacctcnnnnnnnnnnn

SEQ ID NO: 531 - DNA, 22 bp, Artificial Sequence
  source: /note="Description of Artificial Sequence: Synthetic oligonucleotide"
  modified_base (9)..(22): a, c, t, g, unknown or other
gaggggacnnnnnnnnnnnnnn

SEQ ID NO: 532 - DNA, 21 bp, Artificial Sequence
  source: /note="Description of Artificial Sequence: Synthetic oligonucleotide"
  modified_base (8)..(21): a, c, t, g, unknown or other
gagggacnnnnnnnnnnnnnn

SEQ ID NO: 533 - DNA, 19 bp, Artificial Sequence
  source: /note="Description of Artificial Sequence: Synthetic oligonucleotide"
  modified_base (7)..(19): a, c, t, g, unknown or other
gggaccnnnnnnnnnnnnn

SEQ ID NO: 534 - DNA, 19 bp, Artificial Sequence
  source: /note="Description of Artificial Sequence: Synthetic oligonucleotide"
  modified_base (7)..(19): a, c, t, g, unknown or other
gggaccnnnnnnnnnnnnn

SEQ ID NO: 535 - DNA, 19 bp, Artificial Sequence
  source: /note="Description of Artificial Sequence: Synthetic oligonucleotide"
  modified_base (8)..(19): a, c, t, g, unknown or other
gggactcnnnnnnnnnnnn

SEQ ID NO: 536 - DNA, 19 bp, Artificial Sequence
  source: /note="Description of Artificial Sequence: Synthetic oligonucleotide"
  modified_base (10)..(19): a, c, t, g, unknown or other
gggacctggnnnnnnnnnn

SEQ ID NO: 537 - DNA, 23 bp, Artificial Sequence
  source: /note="Description of Artificial Sequence: Synthetic oligonucleotide"
  modified_base (10)..(23): a, c, t, g, unknown or other
ccaggggacnnnnnnnnnnnnnn

SEQ ID NO: 538 - DNA, 22 bp, Artificial Sequence
  source: /note="Description of Artificial Sequence: Synthetic oligonucleotide"
  modified_base (9)..(22): a, c, t, g, unknown or other
ccagggacnnnnnnnnnnnnnn

SEQ ID NO: 539 - DNA, 23 bp, Artificial Sequence
  source: /note="Description of Artificial Sequence: Synthetic oligonucleotide"
  modified_base (10)..(23): a, c, t, g, unknown or other
ccwggggacnnnnnnnnnnnnnn

SEQ ID NO: 540 - DNA, 22 bp, Artificial Sequence
  source: /note="Description of Artificial Sequence: Synthetic oligonucleotide"
  modified_base (9)..(22): a, c, t, g, unknown or other
ccwgggacnnnnnnnnnnnnnn

SEQ ID NO: 541 - DNA, 19 bp, Artificial Sequence
  source: /note="Description of Artificial Sequence: Synthetic oligonucleotide"
  modified_base (10)..(19): a, c, t, g, unknown or other
gggaccwggnnnnnnnnnn

SEQ ID NO: 542 - DNA, 19 bp, Artificial Sequence
  source: /note="Description of Artificial Sequence: Synthetic oligonucleotide"
  modified_base (7)..(19): a, c, t, g, unknown or other
gggaccnnnnnnnnnnnnn

SEQ ID NO: 543 - DNA, 22 bp, Artificial Sequence
  source: /note="Description of Artificial Sequence: Synthetic oligonucleotide"
  modified_base (9)..(22): a, c, t, g, unknown or other
tctgggacnnnnnnnnnnnnnn

SEQ ID NO: 544 - DNA, 23 bp, Artificial Sequence
  source: /note="Description of Artificial Sequence: Synthetic oligonucleotide"
  modified_base (10)..(23): a, c, t, g, unknown or other
rccggggacnnnnnnnnnnnnnn

SEQ ID NO: 545 - DNA, 19 bp, Artificial Sequence
  source: /note="Description of Artificial Sequence: Synthetic oligonucleotide"
  modified_base (10)..(19): a, c, t, g, unknown or other
gggaccggbnnnnnnnnnn

SEQ ID NO: 546 - DNA, 22 bp, Artificial Sequence
  source: /note="Description of Artificial Sequence: Synthetic oligonucleotide"
  modified_base (9)..(22): a, c, t, g, unknown or other
rccgggacnnnnnnnnnnnnnn

SEQ ID NO: 547 - DNA, 23 bp, Artificial Sequence
  source: /note="Description of Artificial Sequence: Synthetic oligonucleotide"
  modified_base (10)..(23): a, c, t, g, unknown or other
tctggggacnnnnnnnnnnnnnn

SEQ ID NO: 548 - DNA, 22 bp, Artificial Sequence
  source: /note="Description of Artificial Sequence: Synthetic oligonucleotide"
  modified_base (9)..(22): a, c, t, g, unknown or other
tctgggacnnnnnnnnnnnnnn

SEQ ID NO: 549 - DNA, 19 bp, Artificial Sequence
  source: /note="Description of Artificial Sequence: Synthetic oligonucleotide"
  modified_base (10)..(19): a, c, t, g, unknown or other
gggaccagannnnnnnnnn

SEQ ID NO: 550 - DNA, 24 bp, Artificial Sequence
  source: /note="Description of Artificial Sequence: Synthetic oligonucleotide"
  modified_base (11)..(24): a, c, t, g, unknown or other
ctcgagggacnnnnnnnnnnnnnn

SEQ ID NO: 551 - DNA, 19 bp, Artificial Sequence
  source: /note="Description of Artificial Sequence: Synthetic oligonucleotide"
  modified_base (11)..(19): a, c, t, g, unknown or other
gggactcgagnnnnnnnnn

SEQ ID NO: 552 - DNA, 19 bp, Artificial Sequence
  source: /note="Description of Artificial Sequence: Synthetic oligonucleotide"
  modified_base (10)..(19): a, c, t, g, unknown or other
gggacatgynnnnnnnnnn

SEQ ID NO: 553 - DNA, 24 bp, Artificial Sequence
  source: /note="Description of Artificial Sequence: Synthetic oligonucleotide"
  modified_base (11)..(24): a, c, t, g, unknown or other
ccatggggacnnnnnnnnnnnnnn

SEQ ID NO: 554 - DNA, 23 bp, Artificial Sequence
  source: /note="Description of Artificial Sequence: Synthetic oligonucleotide"
  modified_base (10)..(23): a, c, t, g, unknown or other
ccatgggacnnnnnnnnnnnnnn

SEQ ID NO: 555 - DNA, 19 bp, Artificial Sequence
  source: /note="Description of Artificial Sequence: Synthetic oligonucleotide"
  modified_base (11)..(19): a, c, t, g, unknown or other
gggaccatggnnnnnnnnn

SEQ ID NO: 556 - DNA, 24 bp, Artificial Sequence
  source: /note="Description of Artificial Sequence: Synthetic oligonucleotide"
  modified_base (11)..(24): a, c, t, g, unknown or other
cgatcgggacnnnnnnnnnnnnnn

SEQ ID NO: 557 - DNA, 19 bp, Artificial Sequence
  source: /note="Description of Artificial Sequence: Synthetic oligonucleotide"
  modified_base (11)..(19): a, c, t, g, unknown or other
gggacgatcgnnnnnnnnn

SEQ ID NO: 558 - DNA, 22 bp, Artificial Sequence
  source: /note="Description of Artificial Sequence: Synthetic oligonucleotide"
  modified_base (9)..(22): a, c, t, g, unknown or other
ctagggacnnnnnnnnnnnnnn

SEQ ID NO: 559 - DNA, 19 bp, Artificial Sequence
  source: /note="Description of Artificial Sequence: Synthetic oligonucleotide"
  modified_base (9)..(19): a, c, t, g, unknown or other
gggactagnnnnnnnnnnn

SEQ ID NO: 560 - DNA, 24 bp, Artificial Sequence
  source: /note="Description of Artificial Sequence: Synthetic oligonucleotide"
  modified_base (11)..(24): a, c, t, g, unknown or other
ccatggggacnnnnnnnnnnnnnn

SEQ ID NO: 561 - DNA, 23 bp, Artificial Sequence
  source: /note="Description of Artificial Sequence: Synthetic oligonucleotide"
  modified_base (10)..(23): a, c, t, g, unknown or other
ccatgggacnnnnnnnnnnnnnn

SEQ ID NO: 562 - DNA, 19 bp, Artificial Sequence
  source: /note="Description of Artificial Sequence: Synthetic oligonucleotide"
  modified_base (11)..(19): a, c, t, g, unknown or other
gggaccatggnnnnnnnnn

SEQ ID NO: 563 - DNA, 24 bp, Artificial Sequence
  source: /note="Description of Artificial Sequence: Synthetic oligonucleotide"
  modified_base (11)..(24): a, c, t, g, unknown or other
ccwwggggacnnnnnnnnnnnnnn

SEQ ID NO: 564 - DNA, 23 bp, Artificial Sequence
  source: /note="Description of Artificial Sequence: Synthetic oligonucleotide"
  modified_base (10)..(23): a, c, t, g, unknown or other
ccwwgggacnnnnnnnnnnnnnn

SEQ ID NO: 565 - DNA, 19 bp, Artificial Sequence
  source: /note="Description of Artificial Sequence: Synthetic oligonucleotide"
  modified_base (11)..(19): a, c, t, g, unknown or other
gggaccwwggnnnnnnnnn

SEQ ID NO: 566 - DNA, 19 bp, Artificial Sequence
  source: /note="Description of Artificial Sequence: Synthetic oligonucleotide"
  modified_base (6)..(9): a, c, t, g, unknown or other
  modified_base (13)..(19): a, c, t, g, unknown or other
gggacnnnntgcnnnnnnn

SEQ ID NO: 567 - DNA, 24 bp, Artificial Sequence
  source: /note="Description of Artificial Sequence: Synthetic oligonucleotide"
  modified_base (11)..(24): a, c, t, g, unknown or other
gaagagggacnnnnnnnnnnnnnn

SEQ ID NO: 568 - DNA, 19 bp, Artificial Sequence
  source: /note="Description of Artificial Sequence: Synthetic oligonucleotide"
  modified_base (11)..(19): a, c, t, g, unknown or other
gggactcttcnnnnnnnnn

SEQ ID NO: 569 - DNA, 23 bp, Artificial Sequence
  source: /note="Description of Artificial Sequence: Synthetic oligonucleotide"
  modified_base (10)..(23): a, c, t, g, unknown or other
castgggacnnnnnnnnnnnnnn

SEQ ID NO: 570 - DNA, 19 bp, Artificial Sequence
  source: /note="Description of Artificial Sequence: Synthetic oligonucleotide"
  modified_base (10)..(19): a, c, t, g, unknown or other
gggacastgnnnnnnnnnn

SEQ ID NO: 571 - DNA, 23 bp, Artificial Sequence
  source: /note="Description of Artificial Sequence: Synthetic oligonucleotide"
  modified_base (10)..(23): a, c, t, g, unknown or other
actggggacnnnnnnnnnnnnnn

SEQ ID NO: 572 - DNA, 22 bp, Artificial Sequence
  source: /note="Description of Artificial Sequence: Synthetic oligonucleotide"
  modified_base (9)..(22): a, c, t, g, unknown or other
actgggacnnnnnnnnnnnnnn

SEQ ID NO: 573 - DNA, 19 bp, Artificial Sequence
  source: /note="Description of Artificial Sequence: Synthetic oligonucleotide"
  modified_base (9)..(19): a, c, t, g, unknown or other
gggactggnnnnnnnnnnn

SEQ ID NO: 574 - DNA, 19 bp, Artificial Sequence
  source: /note="Description of Artificial Sequence: Synthetic oligonucleotide"
  modified_base (10)..(19): a, c, t, g, unknown or other
gggaccagtnnnnnnnnnn

SEQ ID NO: 575 - DNA, 23 bp, Artificial Sequence
  source: /note="Description of Artificial Sequence: Synthetic oligonucleotide"
  modified_base (10)..(23): a, c, t, g, unknown or other
cacggggacnnnnnnnnnnnnnn

SEQ ID NO: 576 - DNA, 22 bp, Artificial Sequence
  source: /note="Description of Artificial Sequence: Synthetic oligonucleotide"
  modified_base (9)..(22): a, c, t, g, unknown or other
cacgggacnnnnnnnnnnnnnn

SEQ ID NO: 577 - DNA, 19 bp, Artificial Sequence
  source: /note="Description of Artificial Sequence: Synthetic oligonucleotide"
  modified_base (9)..(19): a, c, t, g, unknown or other
gggacggcnnnnnnnnnnn

SEQ ID NO: 578 - DNA, 22 bp, Artificial Sequence
  source: /note="Description of Artificial Sequence: Synthetic oligonucleotide"
  modified_base (9)..(22): a, c, t, g, unknown or other
ccsgggacnnnnnnnnnnnnnn

SEQ ID NO: 579 - DNA, 21 bp, Artificial Sequence
  source: /note="Description of Artificial Sequence: Synthetic oligonucleotide"
  modified_base (8)..(21): a, c, t, g, unknown or other
ccgggacnnnnnnnnnnnnnn

SEQ ID NO: 580 - DNA, 23 bp, Artificial Sequence
  source: /note="Description of Artificial Sequence: Synthetic oligonucleotide"
  modified_base (10)..(23): a, c, t, g, unknown or other
actggggacnnnnnnnnnnnnnn

SEQ ID NO: 581 - DNA, 22 bp, Artificial Sequence
  source: /note="Description of Artificial Sequence: Synthetic oligonucleotide"
  modified_base (9)..(22): a, c, t, g, unknown or other
actgggacnnnnnnnnnnnnnn

SEQ ID NO: 582 - DNA, 22 bp, Artificial Sequence
  source: /note="Description of Artificial Sequence: Synthetic oligonucleotide"
  modified_base (9)..(22): a, c, t, g, unknown or other
gcggggacnnnnnnnnnnnnnn

SEQ ID NO: 583 - DNA, 21 bp, Artificial Sequence
  source: /note="Description of Artificial Sequence: Synthetic oligonucleotide"
  modified_base (8)..(21): a, c, t, g, unknown or other
gcgggacnnnnnnnnnnnnnn

SEQ ID NO: 584 - DNA, 19 bp, Artificial Sequence
  source: /note="Description of Artificial Sequence: Synthetic oligonucleotide"
  modified_base (9)..(19): a, c, t, g, unknown or other
gggaccgcnnnnnnnnnnn

SEQ ID NO: 585 - DNA, 19 bp, Artificial Sequence
  source: /note="Description of Artificial Sequence: Synthetic oligonucleotide"
  modified_base (9)..(19): a, c, t, g, unknown or other
gggacggcnnnnnnnnnnn

SEQ ID NO: 586 - DNA, 20 bp, Artificial Sequence
  source: /note="Description of Artificial Sequence: Synthetic oligonucleotide"
  modified_base (7)..(20): a, c, t, g, unknown or other
ggggacnnnnnnnnnnnnnn

SEQ ID NO: 587 - DNA, 19 bp, Artificial Sequence
  source: /note="Description of Artificial Sequence: Synthetic oligonucleotide"
  modified_base (10)..(19): a, c, t, g, unknown or other
gggaccttcnnnnnnnnnn

SEQ ID NO: 588 - DNA, 23 bp, Artificial Sequence
  source: /note="Description of Artificial Sequence: Synthetic oligonucleotide"
  modified_base (10)..(23): a, c, t, g, unknown or other
gaaggggacnnnnnnnnnnnnnn

SEQ ID NO: 589 - DNA, 22 bp, Artificial Sequence
  source: /note="Description of Artificial Sequence: Synthetic oligonucleotide"
  modified_base (9)..(22): a, c, t, g, unknown or other
gaagggacnnnnnnnnnnnnnn

SEQ ID NO: 590 - DNA, 19 bp, Artificial Sequence
  source: /note="Description of Artificial Sequence: Synthetic oligonucleotide"
  modified_base (9)..(19): a, c, t, g, unknown or other
gggacggcnnnnnnnnnnn

SEQ ID NO: 591 - DNA, 19 bp, Artificial Sequence
  source: /note="Description of Artificial Sequence: Synthetic oligonucleotide"
  modified_base (10)..(19): a, c, t, g, unknown or other
gggactgggnnnnnnnnnn

SEQ ID NO: 592 - DNA, 19 bp, Artificial Sequence
  source: /note="Description of Artificial Sequence: Synthetic oligonucleotide"
  modified_base (10)..(19): a, c, t, g, unknown or other
gggacctgcnnnnnnnnnn

SEQ ID NO: 593 - DNA, 19 bp, Artificial Sequence
  source: /note="Description of Artificial Sequence: Synthetic oligonucleotide"
  modified_base (8)..(19): a, c, t, g, unknown or other
gggacgcnnnnnnnnnnnn

SEQ ID NO: 594 - DNA, 19 bp, Artificial Sequence
  source: /note="Description of Artificial Sequence: Synthetic oligonucleotide"
  modified_base (9)..(19): a, c, t, g, unknown or other
gggacctcnnnnnnnnnnn

SEQ ID NO: 595 - DNA, 22 bp, Artificial Sequence
  source: /note="Description of Artificial Sequence: Synthetic oligonucleotide"
  modified_base (9)..(22): a, c, t, g, unknown or other
gaggggacnnnnnnnnnnnnnn

SEQ ID NO: 596 - DNA, 21 bp, Artificial Sequence
  source: /note="Description of Artificial Sequence: Synthetic oligonucleotide"
  modified_base (8)..(21): a, c, t, g, unknown or other
gagggacnnnnnnnnnnnnnn

SEQ ID NO: 597 - DNA, 19 bp, Artificial Sequence
  source: /note="Description of Artificial Sequence: Synthetic oligonucleotide"
  modified_base (8)..(19): a, c, t, g, unknown or other
gggacgcnnnnnnnnnnnn

SEQ ID NO: 598 - DNA, 19 bp, Artificial Sequence
  source: /note="Description of Artificial Sequence: Synthetic oligonucleotide"
  modified_base (10)..(19): a, c, t, g, unknown or other
ccwggacgcnnnnnnnnnn

SEQ ID NO: 599 - DNA, 15 bp, Artificial Sequence
  source: /note="Description of Artificial Sequence: Synthetic oligonucleotide"
  modified_base (10)..(15): a, c, t, g, unknown or other
gacgccwggnnnnnn

SEQ ID NO: 600 - DNA, 18 bp, Artificial Sequence
  source: /note="Description of Artificial Sequence: Synthetic oligonucleotide"
  modified_base (9)..(18): a, c, t, g, unknown or other
gtmgacgcnnnnnnnnnn

SEQ ID NO: 601 - DNA, 18 bp, Artificial Sequence
  source: /note="Description of Artificial Sequence: Synthetic oligonucleotide"
  modified_base (9)..(18): a, c, t, g, unknown or other
gcggacgcnnnnnnnnnn

SEQ ID NO: 602 - DNA, 15 bp, Artificial Sequence
  source: /note="Description of Artificial Sequence: Synthetic oligonucleotide"
  modified_base (8)..(15): a, c, t, g, unknown or other
gacgcggnnnnnnnn

SEQ ID NO: 603 - DNA, 15 bp, Artificial Sequence
  source: /note="Description of Artificial Sequence: Synthetic oligonucleotide"
  modified_base (9)..(15): a, c, t, g, unknown or other
gacgccgcnnnnnnn

SEQ ID NO: 604 - DNA, 15 bp, Artificial Sequence
  source: /note="Description of Artificial Sequence: Synthetic oligonucleotide"
  modified_base (8)..(15): a, c, t, g, unknown or other
gacgcgtnnnnnnnn

SEQ ID NO: 605 - DNA, 17 bp, Artificial Sequence
  source: /note="Description of Artificial Sequence: Synthetic oligonucleotide"
  modified_base (8)..(17): a, c, t, g, unknown or other
gagacgcnnnnnnnnnn

SEQ ID NO: 606 - DNA, 20 bp, Artificial Sequence
  source: /note="Description of Artificial Sequence: Synthetic oligonucleotide"
  modified_base (11)..(20): a, c, t, g, unknown or other
cggccgacgcnnnnnnnnnn

SEQ ID NO: 607 - DNA, 15 bp, Artificial Sequence
  source: /note="Description of Artificial Sequence: Synthetic oligonucleotide"
  modified_base (11)..(15): a, c, t, g, unknown or other
gacgcggccgnnnnn

SEQ ID NO: 608 - DNA, 18 bp, Artificial Sequence
  source: /note="Description of Artificial Sequence: Synthetic oligonucleotide"
  modified_base (9)..(18): a, c, t, g, unknown or other
gtcgacgcnnnnnnnnnn

SEQ ID NO: 609 - DNA, 20 bp, Artificial Sequence
  source: /note="Description of Artificial Sequence: Synthetic oligonucleotide"
  modified_base (11)..(20): a, c, t, g, unknown or other
cycgrgacgcnnnnnnnnnn

SEQ ID NO: 610 - DNA, 15 bp, Artificial Sequence
  source: /note="Description of Artificial Sequence: Synthetic oligonucleotide"
  modified_base (11)..(15): a, c, t, g, unknown or other
gacgcycgrgnnnnn

SEQ ID NO: 611 - DNA, 15 bp, Artificial Sequence
  source: /note="Description of Artificial Sequence: Synthetic oligonucleotide"
  modified_base (10)..(15): a, c, t, g, unknown or other
gacgccggynnnnnn

SEQ ID NO: 612 - DNA, 15 bp, Artificial Sequence
  source: /note="Description of Artificial Sequence: Synthetic oligonucleotide"
  modified_base (9)..(15): a, c, t, g, unknown or other
gacgcwgcnnnnnnn

SEQ ID NO: 613 - DNA, 15 bp, Artificial Sequence
  source: /note="Description of Artificial Sequence: Synthetic oligonucleotide"
  modified_base (9)..(15): a, c, t, g, unknown or other
gacgctgcnnnnnnn

SEQ ID NO: 614 - DNA, 15 bp, Artificial Sequence
  source: /note="Description of Artificial Sequence: Synthetic oligonucleotide"
  modified_base (9)..(15): a, c, t, g, unknown or other
gacgcagcnnnnnnn

SEQ ID NO: 615 - DNA, 20 bp, Artificial Sequence
  source: /note="Description of Artificial Sequence: Synthetic oligonucleotide"
  modified_base (11)..(20): a, c, t, g, unknown or other
ctcgagacgcnnnnnnnnnn

SEQ ID NO: 616 - DNA, 15 bp, Artificial Sequence
  source: /note="Description of Artificial Sequence: Synthetic oligonucleotide"
  modified_base (11)..(15): a, c, t, g, unknown or other
gacgctcgagnnnnn

SEQ ID NO: 617 - DNA, 15 bp, Artificial Sequence
  source: /note="Description of Artificial Sequence: Synthetic oligonucleotide"
  modified_base (7)..(15): a, c, t, g, unknown or other
gacgcgnnnnnnnnn

SEQ ID NO: 618 - DNA, 18 bp, Artificial Sequence
  source: /note="Description of Artificial Sequence: Synthetic oligonucleotide"
  modified_base (9)..(18): a, c, t, g, unknown or other
cgcgacgcnnnnnnnnnn

SEQ ID NO: 619 - DNA, 20 bp, Artificial Sequence
  source: /note="Description of Artificial Sequence: Synthetic oligonucleotide"
  modified_base (11)..(20): a, c, t, g, unknown or other
cycgrgacgcnnnnnnnnnn

SEQ ID NO: 620 - DNA, 15 bp, Artificial Sequence
  source: /note="Description of Artificial Sequence: Synthetic oligonucleotide"
  modified_base (11)..(15): a, c, t, g, unknown or other
gacgcycgrgnnnnn

SEQ ID NO: 621 - DNA, 18 bp, Artificial Sequence
  source: /note="Description of Artificial Sequence: Synthetic oligonucleotide"
  modified_base (9)..(18): a, c, t, g, unknown or other
ccggacgcnnnnnnnnnn

SEQ ID NO: 622 - DNA, 15 bp, Artificial Sequence
  source: /note="Description of Artificial Sequence: Synthetic oligonucleotide"
  modified_base (9)..(15): a, c, t, g, unknown or other
gacgccggnnnnnnn

SEQ ID NO: 623 - DNA, 18 bp, Artificial Sequence
  source: /note="Description of Artificial Sequence: Synthetic oligonucleotide"
  modified_base (9)..(18): a, c, t, g, unknown or other
ctagacgcnnnnnnnnnn

SEQ ID NO: 624 - DNA, 15 bp, Artificial Sequence
  source: /note="Description of Artificial Sequence: Synthetic oligonucleotide"
  modified_base (9)..(15): a, c, t, g, unknown or other
gacgctagnnnnnnn

SEQ ID NO: 625 - DNA, 15 bp, Artificial Sequence
  source: /note="Description of Artificial Sequence: Synthetic oligonucleotide"
  modified_base (6)..(7): a, c, t, g, unknown or other
  modified_base (10)..(15): a, c, t, g, unknown or other
gacgcnngcnnnnnn

SEQ ID NO: 626 - DNA, 19 bp, Artificial Sequence
  source: /note="Description of Artificial Sequence: Synthetic oligonucleotide"
  modified_base (10)..(19): a, c, t, g, unknown or other
tccggacgcnnnnnnnnnn

SEQ ID NO: 627 - DNA, 15 bp, Artificial Sequence
  source: /note="Description of Artificial Sequence: Synthetic oligonucleotide"
  modified_base (8)..(15): a, c, t, g, unknown or other
gacgcgtnnnnnnnn

SEQ ID NO: 628 - DNA, 15 bp, Artificial Sequence
  source: /note="Description of Artificial Sequence: Synthetic oligonucleotide"
  modified_base (11)..(15): a, c, t, g, unknown or other
gacgccggcrnnnnn

SEQ ID NO: 629 - DNA, 15 bp, Artificial Sequence
  source: /note="Description of Artificial Sequence: Synthetic oligonucleotide"
  modified_base (6)..(6): a, c, t, g, unknown or other
  modified_base (9)..(15): a, c, t, g, unknown or other
gacgcngcnnnnnnn

SEQ ID NO: 630 - DNA, 20 bp, Artificial Sequence
  source: /note="Description of Artificial Sequence: Synthetic oligonucleotide"
  modified_base (11)..(20): a, c, t, g, unknown or other
ccwwggacgcnnnnnnnnnn

SEQ ID NO: 631 - DNA, 15 bp, Artificial Sequence
  source: /note="Description of Artificial Sequence: Synthetic oligonucleotide"
  modified_base (11)..(15): a, c, t, g, unknown or other
gacgccwwggnnnnn

SEQ ID NO: 632 - DNA, 19 bp, Artificial Sequence
  source: /note="Description of Artificial Sequence: Synthetic oligonucleotide"
  modified_base (10)..(19): a, c, t, g, unknown or other
ccwggacgcnnnnnnnnnn

SEQ ID NO: 633 - DNA, 15 bp, Artificial Sequence
  source: /note="Description of Artificial Sequence: Synthetic oligonucleotide"
  modified_base (10)..(15): a, c, t, g, unknown or other
gacgccwggnnnnnn

SEQ ID NO: 634 - DNA, 18 bp, Artificial Sequence
  source: /note="Description of Artificial Sequence: Synthetic oligonucleotide"
  modified_base (9)..(18): a, c, t, g, unknown or other
gtygacgcnnnnnnnnnn

SEQ ID NO: 635 - DNA, 15 bp, Artificial Sequence
  source: /note="Description of Artificial Sequence: Synthetic oligonucleotide"
  modified_base (10)..(15): a, c, t, g, unknown or other
gacgccggcnnnnnn

SEQ ID NO: 636 - DNA, 15 bp, Artificial Sequence
  source: /note="Description of Artificial Sequence: Synthetic oligonucleotide"
  modified_base (7)..(15): a, c, t, g, unknown or other
gacgcynnnnnnnnn

SEQ ID NO: 637 - DNA, 17 bp, Artificial Sequence
  source: /note="Description of Artificial Sequence: Synthetic oligonucleotide"
  modified_base (8)..(17): a, c, t, g, unknown or other
tcgacgcnnnnnnnnnn

SEQ ID NO: 638 - DNA, 19 bp, Artificial Sequence
  source: /note="Description of Artificial Sequence: Synthetic oligonucleotide"
  modified_base (3)..(3): a, c, t, g, unknown or other
  modified_base (10)..(19): a, c, t, g, unknown or other
ctnagacgcnnnnnnnnnn

SEQ ID NO: 639 - DNA, 15 bp, Artificial Sequence
  source: /note="Description of Artificial Sequence: Synthetic oligonucleotide"
  modified_base (7)..(7): a, c, t, g, unknown or other
  modified_base (10)..(15): a, c, t, g, unknown or other
gacgctnagnnnnnn

SEQ ID NO: 640 - DNA, 17 bp, Artificial Sequence
  source: /note="Description of Artificial Sequence: Synthetic oligonucleotide"
  modified_base (8)..(17): a, c, t, g, unknown or other
gagacgcnnnnnnnnnn

SEQ ID NO: 641 - DNA, 18 bp, Artificial Sequence
  source: /note="Description of Artificial Sequence: Synthetic oligonucleotide"
  modified_base (9)..(18): a, c, t, g, unknown or other
catgacgcnnnnnnnnnn

SEQ ID NO: 642 - DNA, 15 bp, Artificial Sequence
  source: /note="Description of Artificial Sequence: Synthetic oligonucleotide"
  modified_base (9)..(15): a, c, t, g, unknown or other
gacgcatgnnnnnnn

SEQ ID NO: 643 - DNA, 15 bp, Artificial Sequence
  source: /note="Description of Artificial Sequence: Synthetic oligonucleotide"
  modified_base (7)..(15): a, c, t, g, unknown or other
gacgcgnnnnnnnnn

SEQ ID NO: 644 - DNA, 18 bp, Artificial Sequence
  source: /note="Description of Artificial Sequence: Synthetic oligonucleotide"
  modified_base (9)..(18): a, c, t, g, unknown or other
cgcgacgcnnnnnnnnnn

SEQ ID NO: 645 - DNA, 18 bp, Artificial Sequence
  source: /note="Description of Artificial Sequence: Synthetic oligonucleotide"
  modified_base (9)..(18): a, c, t, g, unknown or other
ccggacgcnnnnnnnnnn

SEQ ID NO: 646 - DNA, 15 bp, Artificial Sequence
  source: /note="Description of Artificial Sequence: Synthetic oligonucleotide"
  modified_base (9)..(15): a, c, t, g, unknown or other
gacgccggnnnnnnn

SEQ ID NO: 647 - DNA, 15 bp, Artificial Sequence
  source: /note="Description of Artificial Sequence: Synthetic oligonucleotide"
  modified_base (6)..(6): a, c, t, g, unknown or other
  modified_base (10)..(15): a, c, t, g, unknown or other
gacgcngtcnnnnnn

SEQ ID NO: 648 - DNA, 15 bp, Artificial Sequence
  source: /note="Description of Artificial Sequence: Synthetic oligonucleotide"
  modified_base (8)..(15): a, c, t, g, unknown or other
gacgcgcnnnnnnnn

SEQ ID NO: 649 - DNA, 19 bp, Artificial Sequence
  source: /note="Description of Artificial Sequence: Synthetic oligonucleotide"
  modified_base (10)..(19): a, c, t, g, unknown or other
tcgcgacgcnnnnnnnnnn

SEQ ID NO: 650 - DNA, 15 bp, Artificial Sequence
  source: /note="Description of Artificial Sequence: Synthetic oligonucleotide"
  modified_base (10)..(15): a, c, t, g, unknown or other
gacgcwgcknnnnnn

SEQ ID NO: 651 - DNA, 18 bp, Artificial Sequence
  source: /note="Description of Artificial Sequence: Synthetic oligonucleotide"
  modified_base (3)..(3): a, c, t, g, unknown or other
  modified_base (9)..(18): a, c, t, g, unknown or other
tcngacgcnnnnnnnnnn

SEQ ID NO: 652 - DNA, 18 bp, Artificial Sequence
  source: /note="Description of Artificial Sequence: Synthetic oligonucleotide"
  modified_base (3)..(3): a, c, t, g, unknown or other
  modified_base (9)..(18): a, c, t, g, unknown or other
gtngacgcnnnnnnnnnn

SEQ ID NO: 653 - DNA, 19 bp, Artificial Sequence
  source: /note="Description of Artificial Sequence: Synthetic oligonucleotide"
  modified_base (3)..(4): a, c, t, g, unknown or other
  modified_base (10)..(19): a, c, t, g, unknown or other
tcnngacgcnnnnnnnnnn

SEQ ID NO: 654 - DNA, 19 bp, Artificial Sequence
  source: /note="Description of Artificial Sequence: Synthetic oligonucleotide"
  modified_base (3)..(3): a, c, t, g, unknown or other
  modified_base (10)..(19): a, c, t, g, unknown or other
ctnagacgcnnnnnnnnnn

SEQ ID NO: 655 - DNA, 15 bp, Artificial Sequence
  source: /note="Description of Artificial Sequence: Synthetic oligonucleotide"
  modified_base (7)..(7): a, c, t, g, unknown or other
  modified_base (10)..(15): a, c, t, g, unknown or other
gacgctnagnnnnnn

SEQ ID NO: 656 - DNA, 16 bp, Artificial Sequence
  source: /note="Description of Artificial Sequence: Synthetic oligonucleotide"
  modified_base (7)..(16): a, c, t, g, unknown or other
cgacgcnnnnnnnnnn

SEQ ID NO: 657 - DNA, 17 bp, Artificial Sequence
  source: /note="Description of Artificial Sequence: Synthetic oligonucleotide"
  modified_base (8)..(17): a, c, t, g, unknown or other
gtgacgcnnnnnnnnnn

SEQ ID NO: 658 - DNA, 20 bp, Artificial Sequence
  source: /note="Description of Artificial Sequence: Synthetic oligonucleotide"
  modified_base (3)..(4): a, c, t, g, unknown or other
  modified_base (11)..(20): a, c, t, g, unknown or other
ccnnggacgcnnnnnnnnnn

SEQ ID NO: 659 - DNA, 15 bp, Artificial Sequence
  source: /note="Description of Artificial Sequence: Synthetic oligonucleotide"
  modified_base (7)..(8): a, c, t, g, unknown or other
  modified_base (11)..(15): a, c, t, g, unknown or other
gacgccnnggnnnnn

SEQ ID NO: 660 - DNA, 15 bp, Artificial Sequence
  source: /note="Description of Artificial Sequence: Synthetic oligonucleotide"
  modified_base (9)..(15): a, c, t, g, unknown or other
gacgcctcnnnnnnn

SEQ ID NO: 661 - DNA, 18 bp, Artificial Sequence
  source: /note="Description of Artificial Sequence: Synthetic oligonucleotide"
  modified_base (9)..(18): a, c, t, g, unknown or other
gaggacgcnnnnnnnnnn

SEQ ID NO: 662 - DNA, 18 bp, Artificial Sequence
  source: /note="Description of Artificial Sequence: Synthetic oligonucleotide"
  modified_base (9)..(18): a, c, t, g, unknown or other
ggwgacgcnnnnnnnnnn

SEQ ID NO: 663 - DNA, 15 bp, Artificial Sequence
  source: /note="Description of Artificial Sequence: Synthetic oligonucleotide"
  modified_base (10)..(15): a, c, t, g, unknown or other
gacgcctggnnnnnn

SEQ ID NO: 664 - DNA, 19 bp, Artificial Sequence
  source: /note="Description of Artificial Sequence: Synthetic oligonucleotide"
  modified_base (10)..(19): a, c, t, g, unknown or other
ccaggacgcnnnnnnnnnn

SEQ ID NO: 665 - DNA, 19 bp, Artificial Sequence
  source: /note="Description of Artificial Sequence: Synthetic oligonucleotide"
  modified_base (10)..(19): a, c, t, g, unknown or other
ccwggacgcnnnnnnnnnn

SEQ ID NO: 666 - DNA, 15 bp, Artificial Sequence
  source: /note="Description of Artificial Sequence: Synthetic oligonucleotide"
  modified_base (10)..(15): a, c, t, g, unknown or other
gacgccwggnnnnnn

SEQ ID NO: 667 - DNA, 15 bp, Artificial Sequence
  source: /note="Description of Artificial Sequence: Synthetic oligonucleotide"
  modified_base (10)..(15): a, c, t, g, unknown or other
gacgctagcnnnnnn

SEQ ID NO: 668 - DNA, 18 bp, Artificial Sequence
  source: /note="Description of Artificial Sequence: Synthetic oligonucleotide"
  modified_base (9)..(18): a, c, t, g, unknown or other
ccagacgcnnnnnnnnnn

SEQ ID NO: 669 - DNA, 15 bp, Artificial Sequence
  source: /note="Description of Artificial Sequence: Synthetic oligonucleotide"
  modified_base (10)..(15): a, c, t, g, unknown or other
gacgcgcgcnnnnnn

SEQ ID NO: 670 - DNA, 15 bp, Artificial Sequence
  source: /note="Description of Artificial Sequence: Synthetic oligonucleotide"
  modified_base (10)..(15): a, c, t, g, unknown or other
gacgccggbnnnnnn

SEQ ID NO: 671 - DNA, 19 bp, Artificial Sequence
  source: /note="Description of Artificial Sequence: Synthetic oligonucleotide"
  modified_base (10)..(19): a, c, t, g, unknown or other
tctggacgcnnnnnnnnnn

SEQ ID NO: 672 - DNA, 15 bp, Artificial Sequence
  source: /note="Description of Artificial Sequence: Synthetic oligonucleotide"
  modified_base (10)..(15): a, c, t, g, unknown or other
gacgccagannnnnn

SEQ ID NO: 673 - DNA, 20 bp, Artificial Sequence
  source: /note="Description of Artificial Sequence: Synthetic oligonucleotide"
  modified_base (11)..(20): a, c, t, g, unknown or other
ctcgagacgcnnnnnnnnnn

SEQ ID NO: 674 - DNA, 15 bp, Artificial Sequence
  source: /note="Description of Artificial Sequence: Synthetic oligonucleotide"
  modified_base (11)..(15): a, c, t, g, unknown or other
gacgctcgagnnnnn

SEQ ID NO: 675 - DNA, 15 bp, Artificial Sequence
  source: /note="Description of Artificial Sequence: Synthetic oligonucleotide"
  modified_base (10)..(15): a, c, t, g, unknown or other
gacgcatgynnnnnn

SEQ ID NO: 676 - DNA, 20 bp, Artificial Sequence
  source: /note="Description of Artificial Sequence: Synthetic oligonucleotide"
  modified_base (11)..(20): a, c, t, g, unknown or other
ccatggacgcnnnnnnnnnn

SEQ ID NO: 677 - DNA, 15 bp, Artificial Sequence
  source: /note="Description of Artificial Sequence: Synthetic oligonucleotide"
  modified_base (11)..(15): a, c, t, g, unknown or other
gacgccatggnnnnn

SEQ ID NO: 678 - DNA, 20 bp, Artificial Sequence
  source: /note="Description of Artificial Sequence: Synthetic oligonucleotide"
  modified_base (11)..(20): a, c, t, g, unknown or other
cgatcgacgcnnnnnnnnnn

SEQ ID NO: 679 - DNA, 15 bp, Artificial Sequence
  source: /note="Description of Artificial Sequence: Synthetic oligonucleotide"
  modified_base (11)..(15): a, c, t, g, unknown or other
gacgcgatcgnnnnn

SEQ ID NO: 680 - DNA, 18 bp, Artificial Sequence
  source: /note="Description of Artificial Sequence: Synthetic oligonucleotide"
  modified_base (9)..(18): a, c, t, g, unknown or other
ctagacgcnnnnnnnnnn

SEQ ID NO: 681 - DNA, 15 bp, Artificial Sequence
  source: /note="Description of Artificial Sequence: Synthetic oligonucleotide"
  modified_base (9)..(15): a, c, t, g, unknown or other
gacgctagnnnnnnn

SEQ ID NO: 682 - DNA, 20 bp, Artificial Sequence
  source: /note="Description of Artificial Sequence: Synthetic oligonucleotide"
  modified_base (11)..(20): a, c, t, g, unknown or other
ccatggacgcnnnnnnnnnn

SEQ ID NO: 683 - DNA, 15 bp, Artificial Sequence
  source: /note="Description of Artificial Sequence: Synthetic oligonucleotide"
  modified_base (11)..(15): a, c, t, g, unknown or other
gacgccatggnnnnn

SEQ ID NO: 684 - DNA, 20 bp, Artificial Sequence
  source: /note="Description of Artificial Sequence: Synthetic oligonucleotide"
  modified_base (11)..(20): a, c, t, g, unknown or other
ccwwggacgcnnnnnnnnnn

SEQ ID NO: 685 - DNA, 15 bp, Artificial Sequence
  source: /note="Description of Artificial Sequence: Synthetic oligonucleotide"
  modified_base (11)..(15): a, c, t, g, unknown or other
gacgccwwggnnnnn

SEQ ID NO: 686 - DNA, 19 bp, Artificial Sequence
  source: /note="Description of Artificial Sequence: Synthetic oligonucleotide"
  modified_base (10)..(19): a, c, t, g, unknown or other
tctagacgcnnnnnnnnnn

SEQ ID NO: 687 - DNA, 15 bp, Artificial Sequence
  source: /note="Description of Artificial Sequence: Synthetic oligonucleotide"
  modified_base (6)..(7): a, c, t, g, unknown or other
  modified_base (11)..(15): a, c, t, g, unknown or other
gacgcnntgcnnnnn

SEQ ID NO: 688 - DNA, 20 bp, Artificial Sequence
  source: /note="Description of Artificial Sequence: Synthetic oligonucleotide"
  modified_base (11)..(20): a, c, t, g, unknown or other
gaagagacgcnnnnnnnnnn

SEQ ID NO: 689 - DNA, 15 bp, Artificial Sequence
  source: /note="Description of Artificial Sequence: Synthetic oligonucleotide"
  modified_base (11)..(15): a, c, t, g, unknown or other
gacgctcttcnnnnn

SEQ ID NO: 690 - DNA, 19 bp, Artificial Sequence
  source: /note="Description of Artificial Sequence: Synthetic oligonucleotide"
  modified_base (10)..(19): a, c, t, g, unknown or other
castgacgcnnnnnnnnnn

SEQ ID NO: 691 - DNA, 15 bp, Artificial Sequence
  source: /note="Description of Artificial Sequence: Synthetic oligonucleotide"
  modified_base (10)..(15): a, c, t, g, unknown or other
gacgcastgnnnnnn

SEQ ID NO: 692 - DNA, 15 bp, Artificial Sequence
  source: /note="Description of Artificial Sequence: Synthetic oligonucleotide"
  modified_base (10)..(15): a, c, t, g, unknown or other
gacgcgcgcnnnnnn

SEQ ID NO: 693 - DNA, 19 bp, Artificial Sequence
  source: /note="Description of Artificial Sequence: Synthetic oligonucleotide"
  modified_base (10)..(19): a, c, t, g, unknown or other
actggacgcnnnnnnnnnn

SEQ ID NO: 694 - DNA, 15 bp, Artificial Sequence
  source: /note="Description of Artificial Sequence: Synthetic oligonucleotide"
  modified_base (10)..(15): a, c, t, g, unknown or other
gacgccagtnnnnnn

SEQ ID NO: 695 - DNA, 18 bp, Artificial Sequence
  source: /note="Description of Artificial Sequence: Synthetic oligonucleotide"
  modified_base (9)..(18): a, c, t, g, unknown or other
gcggacgcnnnnnnnnnn

SEQ ID NO: 696 - DNA, 15 bp, Artificial Sequence
  source: /note="Description of Artificial Sequence: Synthetic oligonucleotide"
  modified_base (9)..(15): a, c, t, g, unknown or other
gacgccgcnnnnnnn

SEQ ID NO: 697 - DNA, 18 bp, Artificial Sequence
  source: /note="Description of Artificial Sequence: Synthetic oligonucleotide"
  modified_base (9)..(18): a, c, t, g, unknown or other
ggtgacgcnnnnnnnnnn

SEQ ID NO: 698 - DNA, 18 bp, Artificial Sequence
  source: /note="Description of Artificial Sequence: Synthetic oligonucleotide"
  modified_base (9)..(18): a, c, t, g, unknown or other
grrgacgcnnnnnnnnnn

SEQ ID NO: 699 - DNA, 18 bp, Artificial Sequence
  source: /note="Description of Artificial Sequence: Synthetic oligonucleotide"
  modified_base (9)..(18): a, c, t, g, unknown or other
gaagacgcnnnnnnnnnn

SEQ ID NO: 700 - DNA, 15 bp, Artificial Sequence
  source: /note="Description of Artificial Sequence: Synthetic oligonucleotide"
  modified_base (10)..(15): a, c, t, g, unknown or other
gacgccttcnnnnnn

SEQ ID NO: 701 - DNA, 19 bp, Artificial Sequence
  source: /note="Description of Artificial Sequence: Synthetic oligonucleotide"
  modified_base (10)..(19): a, c, t, g, unknown or other
gaaggacgcnnnnnnnnnn

SEQ ID NO: 702 - DNA, 15 bp, Artificial Sequence
  source: /note="Description of Artificial Sequence: Synthetic oligonucleotide"
  modified_base (11)..(15): a, c, t, g, unknown or other
gacgctcttcnnnnn

SEQ ID NO: 703 - DNA, 15 bp, Artificial Sequence
  source: /note="Description of Artificial Sequence: Synthetic oligonucleotide"
  modified_base (9)..(15): a, c, t, g, unknown or other
gacgccgtnnnnnnn

SEQ ID NO: 704 - DNA, 18 bp, Artificial Sequence
  source: /note="Description of Artificial Sequence: Synthetic oligonucleotide"
  modified_base (9)..(18): a, c, t, g, unknown or other
ggtgacgcnnnnnnnnnn

SEQ ID NO: 705 - DNA, 18 bp, Artificial Sequence
  source: /note="Description of Artificial Sequence: Synthetic oligonucleotide"
  modified_base (9)..(18): a, c, t, g, unknown or other
gaagacgcnnnnnnnnnn

SEQ ID NO: 706 - DNA, 15 bp, Artificial Sequence
  source: /note="Description of Artificial Sequence: Synthetic oligonucleotide"
  modified_base (9)..(15): a, c, t, g, unknown or other
gacgcctcnnnnnnn

SEQ ID NO: 707 - DNA, 18 bp, Artificial Sequence
  source: /note="Description of Artificial Sequence: Synthetic oligonucleotide"
  modified_base (9)..(18): a, c, t, g, unknown or other
gaggacgcnnnnnnnnnn

SEQ ID NO: 708 - DNA, 17 bp, Artificial Sequence
  source: /note="Description of Artificial Sequence: Synthetic oligonucleotide"
  modified_base (8)..(17): a, c, t, g, unknown or other
gggacgcnnnnnnnnnn

SEQ ID NO: 709 - DNA, 22 bp, Artificial Sequence
  source: /note="Description of Artificial Sequence: Synthetic oligonucleotide"
  modified_base (10)..(22): a, c, t, g, unknown or other
ccwgggatgnnnnnnnnnnnnn

SEQ ID NO: 710 - DNA, 21 bp, Artificial Sequence
  source: /note="Description of Artificial Sequence: Synthetic oligonucleotide"
  modified_base (9)..(21): a, c, t, g, unknown or other
ccwggatgnnnnnnnnnnnnn

SEQ ID NO: 711 - DNA, 21 bp, Artificial Sequence
  source: /note="Description of Artificial Sequence: Synthetic oligonucleotide"
  modified_base (9)..(21): a, c, t, g, unknown or other
gcgggatgnnnnnnnnnnnnn

SEQ ID NO: 712 - DNA, 20 bp, Artificial Sequence
  source: /note="Description of Artificial Sequence: Synthetic oligonucleotide"
  modified_base (8)..(20): a, c, t, g, unknown or other
gcggatgnnnnnnnnnnnnn

SEQ ID NO: 713 - DNA, 23 bp, Artificial Sequence
  source: /note="Description of Artificial Sequence: Synthetic oligonucleotide"
  modified_base (11)..(23): a, c, t, g, unknown or other
cggccggatgnnnnnnnnnnnnn

SEQ ID NO: 714 - DNA, 23 bp, Artificial Sequence
  source: /note="Description of Artificial Sequence: Synthetic oligonucleotide"
  modified_base (11)..(23): a, c, t, g, unknown or other
cycgrggatgnnnnnnnnnnnnn

SEQ ID NO: 715 - DNA, 22 bp, Artificial Sequence
  source: /note="Description of Artificial Sequence: Synthetic oligonucleotide"
  modified_base (10)..(22): a, c, t, g, unknown or other
cycgggatgnnnnnnnnnnnnn

SEQ ID NO: 716 - DNA, 21 bp, Artificial Sequence
  source: /note="Description of Artificial Sequence: Synthetic oligonucleotide"
  modified_base (9)..(21): a, c, t, g, unknown or other
ccwggatgnnnnnnnnnnnnn

SEQ ID NO: 717 - DNA, 18 bp, Artificial Sequence
  source: /note="Description of Artificial Sequence: Synthetic oligonucleotide"
  modified_base (9)..(18): a, c, t, g, unknown or other
ggatgatcnnnnnnnnnn

SEQ ID NO: 718 - DNA, 18 bp, Artificial Sequence
  source: /note="Description of Artificial Sequence: Synthetic oligonucleotide"
  modified_base (10)..(18): a, c, t, g, unknown or other
ggatggwccnnnnnnnnn

SEQ ID NO: 719 - DNA, 23 bp, Artificial Sequence
  source: /note="Description of Artificial Sequence: Synthetic oligonucleotide"
  modified_base (11)..(23): a, c, t, g, unknown or other
ctcgaggatgnnnnnnnnnnnnn

SEQ ID NO: 720 - DNA, 21 bp, Artificial Sequence
  source: /note="Description of Artificial Sequence: Synthetic oligonucleotide"
  modified_base (9)..(21): a, c, t, g, unknown or other
cgcggatgnnnnnnnnnnnnn

SEQ ID NO: 721 - DNA, 18 bp, Artificial Sequence
  source: /note="Description of Artificial Sequence: Synthetic oligonucleotide"
  modified_base (9)..(18): a, c, t, g, unknown or other
ggatgcatnnnnnnnnnn

SEQ ID NO: 722 - DNA, 21 bp, Artificial Sequence
  source: /note="Description of Artificial Sequence: Synthetic oligonucleotide"
  modified_base (9)..(21): a, c, t, g, unknown or other
ccwggatgnnnnnnnnnnnnn

SEQ ID NO: 723 - DNA, 23 bp, Artificial Sequence
  source: /note="Description of Artificial Sequence: Synthetic oligonucleotide"
  modified_base (11)..(23): a, c, t, g, unknown or other
cycgrggatgnnnnnnnnnnnnn

SEQ ID NO: 724 - DNA, 22 bp, Artificial Sequence
  source: /note="Description of Artificial Sequence: Synthetic oligonucleotide"
  modified_base (10)..(22): a, c, t, g, unknown or other
cycgggatgnnnnnnnnnnnnn

SEQ ID NO: 725 - DNA, 18 bp, Artificial Sequence
  source: /note="Description of Artificial Sequence: Synthetic oligonucleotide"
  modified_base (9)..(18): a, c, t, g, unknown or other
ggatgatcnnnnnnnnnn

SEQ ID NO: 726 - DNA, 24 bp, Artificial Sequence
  source: /note="Description of Artificial Sequence: Synthetic oligonucleotide"
  modified_base (4)..(6): a, c, t, g, unknown or other
  modified_base (13)..(24): a, c, t, g, unknown or other
ccannnggatggnnnnnnnnnnnn

SEQ ID NO: 727 - DNA, 21 bp, Artificial Sequence
  source: /note="Description of Artificial Sequence: Synthetic oligonucleotide"
  modified_base (9)..(21): a, c, t, g, unknown or other
ccgggatgnnnnnnnnnnnnn

SEQ ID NO: 728 - DNA, 20 bp, Artificial Sequence
  source: /note="Description of Artificial Sequence: Synthetic oligonucleotide"
  modified_base (8)..(20): a, c, t, g, unknown or other
ccggatgnnnnnnnnnnnnn

SEQ ID NO: 729 - DNA, 21 bp, Artificial Sequence
  source: /note="Description of Artificial Sequence: Synthetic oligonucleotide"
  modified_base (9)..(21): a, c, t, g, unknown or other
ctaggatgnnnnnnnnnnnnn

SEQ ID NO: 730 - DNA, 21 bp, Artificial Sequence
  source: /note="Description of Artificial Sequence: Synthetic oligonucleotide"
  modified_base (9)..(21): a, c, t, g, unknown or other
tccggatgnnnnnnnnnnnnn

SEQ ID NO: 731 - DNA, 22 bp, Artificial Sequence
  source: /note="Description of Artificial Sequence: Synthetic oligonucleotide"
  modified_base (10)..(22): a, c, t, g, unknown or other
ccssggatgnnnnnnnnnnnnn

SEQ ID NO: 732 - DNA, 22 bp, Artificial Sequence
  source: /note="Description of Artificial Sequence: Synthetic oligonucleotide"
  modified_base (10)..(22): a, c, t, g, unknown or other
cccgggatgnnnnnnnnnnnnn

SEQ ID NO: 733 - DNA, 23 bp, Artificial Sequence
  source: /note="Description of Artificial Sequence: Synthetic oligonucleotide"
  modified_base (11)..(23): a, c, t, g, unknown or other
ccwwgggatgnnnnnnnnnnnnn

SEQ ID NO: 734 - DNA, 22 bp, Artificial Sequence
  source: /note="Description of Artificial Sequence: Synthetic oligonucleotide"
  modified_base (10)..(22): a, c, t, g, unknown or other
ccwwggatgnnnnnnnnnnnnn

SEQ ID NO: 735 - DNA, 22 bp, Artificial Sequence
  source: /note="Description of Artificial Sequence: Synthetic oligonucleotide"
  modified_base (10)..(22): a, c, t, g, unknown or other
ccwgggatgnnnnnnnnnnnnn

SEQ ID NO: 736 - DNA, 21 bp, Artificial Sequence
  source: /note="Description of Artificial Sequence: Synthetic oligonucleotide"
  modified_base (9)..(21): a, c, t, g, unknown or other
ccwggatgnnnnnnnnnnnnn

SEQ ID NO: 737 - DNA, 18 bp, Artificial Sequence
  source: /note="Description of Artificial Sequence: Synthetic oligonucleotide"
  modified_base (7)..(7): a, c, t, g, unknown or other
  modified_base (10)..(18): a, c, t, g, unknown or other
ggatggnccnnnnnnnnn

SEQ ID NO: 738 - DNA, 21 bp, Artificial Sequence
  source: /note="Description of Artificial Sequence: Synthetic oligonucleotide"
  modified_base (9)..(21): a, c, t, g, unknown or other
ccwggatgnnnnnnnnnnnnn

SEQ ID NO: 739 - DNA, 18 bp, Artificial Sequence
  source: /note="Description of Artificial Sequence: Synthetic oligonucleotide"
  modified_base (8)..(18): a, c, t, g, unknown or other
ggatgcannnnnnnnnnn

SEQ ID NO: 740 - DNA, 18 bp, Artificial Sequence
  source: /note="Description of Artificial Sequence: Synthetic oligonucleotide"
  modified_base (9)..(18): a, c, t, g, unknown or other
ggatgtacnnnnnnnnnn

SEQ ID NO: 741 - DNA, 22 bp, Artificial Sequence
  source: /note="Description of Artificial Sequence: Synthetic oligonucleotide"
  modified_base (3)..(3): a, c, t, g, unknown or other
  modified_base (10)..(22): a, c, t, g, unknown or other
ctnaggatgnnnnnnnnnnnnn

SEQ ID NO: 742 - DNA, 21 bp, Artificial Sequence
  source: /note="Description of Artificial Sequence: Synthetic oligonucleotide"
  modified_base (3)..(3): a, c, t, g, unknown or other
  modified_base (9)..(21): a, c, t, g, unknown or other
ccnggatgnnnnnnnnnnnnn

SEQ ID NO: 743 - DNA, 22 bp, Artificial Sequence
  source: /note="Description of Artificial Sequence: Synthetic oligonucleotide"
  modified_base (10)..(22): a, c, t, g, unknown or other
ccgcggatgnnnnnnnnnnnnn

SEQ ID NO: 744 - DNA, 27 bp, Artificial Sequence
  source: /note="Description of Artificial Sequence: Synthetic oligonucleotide"
  modified_base (4)..(8): a, c, t, g, unknown or other
  modified_base (15)..(27): a, c, t, g, unknown or other
cctnnnnnaggatgnnnnnnnnnnnnn

SEQ ID NO: 745 - DNA, 20 bp, Artificial Sequence
  source: /note="Description of Artificial Sequence: Synthetic oligonucleotide"
  modified_base (8)..(20): a, c, t, g, unknown or other
ccggatgnnnnnnnnnnnnn

SEQ ID NO: 746 - DNA, 23 bp, Artificial Sequence
  source: /note="Description of Artificial Sequence: Synthetic oligonucleotide"
  modified_base (4)..(5): a, c, t, g, unknown or other
  modified_base (12)..(23): a, c, t, g, unknown or other
ccannggatggnnnnnnnnnnnn

SEQ ID NO: 747 - DNA, 21 bp, Artificial Sequence
  source: /note="Description of Artificial Sequence: Synthetic oligonucleotide"
  modified_base (9)..(21): a, c, t, g, unknown or other
catggatgnnnnnnnnnnnnn

SEQ ID NO: 748 - DNA, 21 bp, Artificial Sequence
  source: /note="Description of Artificial Sequence: Synthetic oligonucleotide"
  modified_base (9)..(21): a, c, t, g, unknown or other
cgcggatgnnnnnnnnnnnnn

SEQ ID NO: 749 - DNA, 21 bp, Artificial Sequence
  source: /note="Description of Artificial Sequence: Synthetic oligonucleotide"
  modified_base (9)..(21): a, c, t, g, unknown or other
ccgggatgnnnnnnnnnnnnn

SEQ ID NO: 750 - DNA, 20 bp, Artificial Sequence
  source: /note="Description of Artificial Sequence: Synthetic oligonucleotide"
  modified_base (8)..(20): a, c, t, g, unknown or other
ccggatgnnnnnnnnnnnnn

SEQ ID NO: 751 - DNA, 20 bp, Artificial Sequence
  source: /note="Description of Artificial Sequence: Synthetic oligonucleotide"
  modified_base (8)..(20): a, c, t, g, unknown or other
ccggatgnnnnnnnnnnnnn

SEQ ID NO: 752 - DNA, 20 bp, Artificial Sequence
  source: /note="Description of Artificial Sequence: Synthetic oligonucleotide"
  modified_base (8)..(20): a, c, t, g, unknown or other
ctggatgnnnnnnnnnnnnn

SEQ ID NO: 753 - DNA, 20 bp, Artificial Sequence
  source: /note="Description of Artificial Sequence: Synthetic oligonucleotide"
  modified_base (8)..(20): a, c, t, g, unknown or other
tcggatgnnnnnnnnnnnnn

SEQ ID NO: 754 - DNA, 21 bp, Artificial Sequence
  source: /note="Description of Artificial Sequence: Synthetic oligonucleotide"
  modified_base (3)..(3): a, c, t, g, unknown or other
  modified_base (9)..(21): a, c, t, g, unknown or other
tcnggatgnnnnnnnnnnnnn

SEQ ID NO: 755 - DNA, 22 bp, Artificial Sequence
  source: /note="Description of Artificial Sequence: Synthetic oligonucleotide"
  modified_base (3)..(3): a, c, t, g, unknown or other
  modified_base (10)..(22): a, c, t, g, unknown or other
ctnaggatgnnnnnnnnnnnnn

SEQ ID NO: 756 - DNA, 23 bp, Artificial Sequence
  source: /note="Description of Artificial Sequence: Synthetic oligonucleotide"
  modified_base (3)..(4): a, c, t, g, unknown or other
  modified_base (11)..(23): a, c, t, g, unknown or other
ccnngggatgnnnnnnnnnnnnn

SEQ ID NO: 757 - DNA, 22 bp, Artificial Sequence
  source: /note="Description of Artificial Sequence: Synthetic oligonucleotide"
  modified_base (3)..(4): a, c, t, g, unknown or other
  modified_base (10)..(22): a, c, t, g, unknown or other
ccnnggatgnnnnnnnnnnnnn

SEQ ID NO: 758 - DNA, 21 bp, Artificial Sequence
  source: /note="Description of Artificial Sequence: Synthetic oligonucleotide"
  modified_base (9)..(21): a, c, t, g, unknown or other
gaaggatgnnnnnnnnnnnnn

SEQ ID NO: 759 - DNA, 21 bp, Artificial Sequence
  source: /note="Description of Artificial Sequence: Synthetic oligonucleotide"
  modified_base (9)..(21): a, c, t, g, unknown or other
gagggatgnnnnnnnnnnnnn

SEQ ID NO: 760 - DNA, 20 bp, Artificial Sequence
  source: /note="Description of Artificial Sequence: Synthetic oligonucleotide"
  modified_base (8)..(20): a, c, t, g, unknown or other
gaggatgnnnnnnnnnnnnn

SEQ ID NO: 761 - DNA, 18 bp, Artificial Sequence
  source: /note="Description of Artificial Sequence: Synthetic oligonucleotide"
  modified_base (7)..(7): a, c, t, g, unknown or other
  modified_base (10)..(18): a, c, t, g, unknown or other
ggatggnccnnnnnnnnn

SEQ ID NO: 762 - DNA, 22 bp, Artificial Sequence
  source: /note="Description of Artificial Sequence: Synthetic oligonucleotide"
  modified_base (10)..(22): a, c, t, g, unknown or other
ccagggatgnnnnnnnnnnnnn

SEQ ID NO: 763 - DNA, 21 bp, Artificial Sequence
  source: /note="Description of Artificial Sequence: Synthetic oligonucleotide"
  modified_base (9)..(21): a, c, t, g, unknown or other
ccaggatgnnnnnnnnnnnnn

SEQ ID NO: 764 - DNA, 22 bp, Artificial Sequence
  source: /note="Description of Artificial Sequence: Synthetic oligonucleotide"
  modified_base (10)..(22): a, c, t, g, unknown or other
ccwgggatgnnnnnnnnnnnnn

SEQ ID NO: 765 - DNA, 21 bp, Artificial Sequence
  source: /note="Description of Artificial Sequence: Synthetic oligonucleotide"
  modified_base (9)..(21): a, c, t, g, unknown or other
ccwggatgnnnnnnnnnnnnn

SEQ ID NO: 766 - DNA, 18 bp, Artificial Sequence
  source: /note="Description of Artificial Sequence: Synthetic oligonucleotide"
  modified_base (11)..(18): a, c, t, g, unknown or other
ggatgctagcnnnnnnnn

SEQ ID NO: 767 - DNA, 21 bp, Artificial Sequence
  source: /note="Description of Artificial Sequence: Synthetic oligonucleotide"
  modified_base (9)..(21): a, c, t, g, unknown or other
tctggatgnnnnnnnnnnnnn

SEQ ID NO: 768 - DNA, 22 bp, Artificial Sequence
  source: /note="Description of Artificial Sequence: Synthetic oligonucleotide"
  modified_base (10)..(22): a, c, t, g, unknown or other
rccgggatgnnnnnnnnnnnnn

SEQ ID NO: 769 - DNA, 22 bp, Artificial Sequence
  source: /note="Description of Artificial Sequence: Synthetic oligonucleotide"
  modified_base (10)..(22): a, c, t, g, unknown or other
tctgggatgnnnnnnnnnnnnn

SEQ ID NO: 770 - DNA, 21 bp, Artificial Sequence
  source: /note="Description of Artificial Sequence: Synthetic oligonucleotide"
  modified_base (9)..(21): a, c, t, g, unknown or other
tctggatgnnnnnnnnnnnnn

SEQ ID NO: 771 - DNA, 23 bp, Artificial Sequence
  source: /note="Description of Artificial Sequence: Synthetic oligonucleotide"
  modified_base (11)..(23): a, c, t, g, unknown or other
ctcgaggatgnnnnnnnnnnnnn

SEQ ID NO: 772 - DNA, 23 bp, Artificial Sequence
  source: /note="Description of Artificial Sequence: Synthetic oligonucleotide"
  modified_base (11)..(23): a, c, t, g, unknown or other
ccatgggatgnnnnnnnnnnnnn

SEQ ID NO: 773 - DNA, 22 bp, Artificial Sequence
  source: /note="Description of Artificial Sequence: Synthetic oligonucleotide"
  modified_base (10)..(22): a, c, t, g, unknown or other
ccatggatgnnnnnnnnnnnnn

SEQ ID NO: 774 - DNA, 23 bp, Artificial Sequence
  source: /note="Description of Artificial Sequence: Synthetic oligonucleotide"
  modified_base (11)..(23): a, c, t, g, unknown or other
cgatcggatgnnnnnnnnnnnnn

SEQ ID NO: 775 - DNA, 21 bp, Artificial Sequence
  source: /note="Description of Artificial Sequence: Synthetic oligonucleotide"
  modified_base (9)..(21): a, c, t, g, unknown or other
ctaggatgnnnnnnnnnnnnn

SEQ ID NO: 776 - DNA, 23 bp, Artificial Sequence
  source: /note="Description of Artificial Sequence: Synthetic oligonucleotide"
  modified_base (11)..(23): a, c, t, g, unknown or other
ccatgggatgnnnnnnnnnnnnn

SEQ ID NO: 777 - DNA, 22 bp, Artificial Sequence
  source: /note="Description of Artificial Sequence: Synthetic oligonucleotide"
  modified_base (10)..(22): a, c, t, g, unknown or other
ccatggatgnnnnnnnnnnnnn

SEQ ID NO: 778 - DNA, 23 bp, Artificial Sequence
  source: /note="Description of Artificial Sequence: Synthetic oligonucleotide"
  modified_base (11)..(23): a, c, t, g, unknown or other
ccwwgggatgnnnnnnnnnnnnn

SEQ ID NO: 779 - DNA, 22 bp, Artificial Sequence
  source: /note="Description of Artificial Sequence: Synthetic oligonucleotide"
  modified_base (10)..(22): a, c, t, g, unknown or other
ccwwggatgnnnnnnnnnnnnn

SEQ ID NO: 780 - DNA, 22 bp, Artificial Sequence
  source: /note="Description of Artificial Sequence: Synthetic oligonucleotide"
  modified_base (4)..(4): a, c, t, g, unknown or other
  modified_base (11)..(22): a, c, t, g, unknown or other
gacnggatgcnnnnnnnnnnnn

SEQ ID NO: 781 - DNA, 23 bp, Artificial Sequence
  source: /note="Description of Artificial Sequence: Synthetic oligonucleotide"
  modified_base (11)..(23): a, c, t, g, unknown or other
gaagaggatgnnnnnnnnnnnnn

SEQ ID NO: 782 - DNA, 22 bp, Artificial Sequence
  source: /note="Description of Artificial Sequence: Synthetic oligonucleotide"
  modified_base (10)..(22): a, c, t, g, unknown or other
castggatgnnnnnnnnnnnnn

SEQ ID NO: 783 - DNA, 27 bp, Artificial Sequence
  source: /note="Description of Artificial Sequence: Synthetic oligonucleotide"
  modified_base (4)..(9): a, c, t, g, unknown or other
  modified_base (16)..(27): a, c, t, g, unknown or other
ccannnnnnggatggnnnnnnnnnnnn

SEQ ID NO: 784 - DNA, 22 bp, Artificial Sequence
  source: /note="Description of Artificial Sequence: Synthetic oligonucleotide"
  modified_base (10)..(22): a, c, t, g, unknown or other
actgggatgnnnnnnnnnnnnn

SEQ ID NO: 785 - DNA, 21 bp, Artificial Sequence
  source: /note="Description of Artificial Sequence: Synthetic oligonucleotide"
  modified_base (9)..(21): a, c, t, g, unknown or other
actggatgnnnnnnnnnnnnn

SEQ ID NO: 786 - DNA, 22 bp, Artificial Sequence
  source: /note="Description of Artificial Sequence: Synthetic oligonucleotide"
  modified_base (10)..(22): a, c, t, g, unknown or other
cacgggatgnnnnnnnnnnnnn

SEQ ID NO: 787 - DNA, 18 bp, Artificial Sequence
  source: /note="Description of Artificial Sequence: Synthetic oligonucleotide"
  modified_base (7)..(18): a, c, t, g, unknown or other
ggatggnnnnnnnnnnnn

SEQ ID NO: 788 - DNA, 21 bp, Artificial Sequence
  source: /note="Description of Artificial Sequence: Synthetic oligonucleotide"
  modified_base (9)..(21): a, c, t, g, unknown or other
ccsggatgnnnnnnnnnnnnn

SEQ ID NO: 789 - DNA, 22 bp, Artificial Sequence
  source: /note="Description of Artificial Sequence: Synthetic oligonucleotide"
  modified_base (10)..(22): a, c, t, g, unknown or other
actgggatgnnnnnnnnnnnnn

SEQ ID NO: 790 - DNA, 18 bp, Artificial Sequence
  source: /note="Description of Artificial Sequence: Synthetic oligonucleotide"
  modified_base (7)..(18): a, c, t, g, unknown or other
ggatgcnnnnnnnnnnnn

SEQ ID NO: 791 - DNA, 21 bp, Artificial Sequence
  source: /note="Description of Artificial Sequence: Synthetic oligonucleotide"
  modified_base (9)..(21): a, c, t, g, unknown or other
gcgggatgnnnnnnnnnnnnn

SEQ ID NO: 792 - DNA, 20 bp, Artificial Sequence
  source: /note="Description of Artificial Sequence: Synthetic oligonucleotide"
  modified_base (8)..(20): a, c, t, g, unknown or other
gcggatgnnnnnnnnnnnnn

SEQ ID NO: 793 - DNA, 18 bp, Artificial Sequence
  source: /note="Description of Artificial Sequence: Synthetic oligonucleotide"
  modified_base (7)..(18): a, c, t, g, unknown or other
ggatgcnnnnnnnnnnnn

SEQ ID NO: 794 - DNA, 18 bp, Artificial Sequence
  source: /note="Description of Artificial Sequence: Synthetic oligonucleotide"
  modified_base (7)..(18): a, c, t, g, unknown or other
ggatggnnnnnnnnnnnn

SEQ ID NO: 795 - DNA, 20 bp, Artificial Sequence
  source: /note="Description of Artificial Sequence: Synthetic oligonucleotide"
  modified_base (8)..(20): a, c, t, g, unknown or other
grggatgnnnnnnnnnnnnn

SEQ ID NO: 796 - DNA, 22 bp, Artificial Sequence
  source: /note="Description of Artificial Sequence: Synthetic oligonucleotide"
  modified_base (10)..(22): a, c, t, g, unknown or other
gaagggatgnnnnnnnnnnnnn

SEQ ID NO: 797 - DNA, 21 bp, Artificial Sequence
  source: /note="Description of Artificial Sequence: Synthetic oligonucleotide"
  modified_base (9)..(21): a, c, t, g, unknown or other
gaaggatgnnnnnnnnnnnnn

SEQ ID NO: 798 - DNA, 18 bp, Artificial Sequence
  source: /note="Description of Artificial Sequence: Synthetic oligonucleotide"
  modified_base (7)..(18): a, c, t, g, unknown or other
ggatggnnnnnnnnnnnn

SEQ ID NO: 799 - DNA, 18 bp, Artificial Sequence
  source: /note="Description of Artificial Sequence: Synthetic oligonucleotide"
  modified_base (7)..(18): a, c, t, g, unknown or other
ggatgcnnnnnnnnnnnn

SEQ ID NO: 800 - DNA, 21 bp, Artificial Sequence
  source: /note="Description of Artificial Sequence: Synthetic oligonucleotide"
  modified_base (9)..(21): a, c, t, g, unknown or other
gagggatgnnnnnnnnnnnnn

SEQ ID NO: 801 - DNA, 20 bp, Artificial Sequence
  source: /note="Description of Artificial Sequence: Synthetic oligonucleotide"
  modified_base (8)..(20): a, c, t, g, unknown or other
gaggatgnnnnnnnnnnnnn

SEQ ID NO: 802 - DNA, 23 bp, Artificial Sequence
  source: /note="Description of Artificial Sequence: Synthetic oligonucleotide"
  modified_base (10)..(23): a, c, t, g, unknown or other
ccwgggatgnnnnnnnnnnnnnn

SEQ ID NO: 803 - DNA, 22 bp, Artificial Sequence
  source: /note="Description of Artificial Sequence: Synthetic oligonucleotide"
  modified_base (9)..(22): a, c, t, g, unknown or other
ccwggatgnnnnnnnnnnnnnn

SEQ ID NO: 804 - DNA, 22 bp, Artificial Sequence
  source: /note="Description of Artificial Sequence: Synthetic oligonucleotide"
  modified_base (9)..(22): a, c, t, g, unknown or other
gcgggatgnnnnnnnnnnnnnn

SEQ ID NO: 805 - DNA, 21 bp, Artificial Sequence
  source: /note="Description of Artificial Sequence: Synthetic oligonucleotide"
  modified_base (8)..(21): a, c, t, g, unknown or other
gcggatgnnnnnnnnnnnnnn

SEQ ID NO: 806 - DNA, 24 bp, Artificial Sequence
  source: /note="Description of Artificial Sequence: Synthetic oligonucleotide"
  modified_base (11)..(24): a, c, t, g, unknown or other
cggccggatgnnnnnnnnnnnnnn

SEQ ID NO: 807 - DNA, 24 bp, Artificial Sequence
  source: /note="Description of Artificial Sequence: Synthetic oligonucleotide"
  modified_base (11)..(24): a, c, t, g, unknown or other
cycgrggatgnnnnnnnnnnnnnn

SEQ ID NO: 808 - DNA, 23 bp, Artificial Sequence
  source: /note="Description of Artificial Sequence: Synthetic oligonucleotide"
  modified_base (10)..(23): a, c, t, g, unknown or other
cycgggatgnnnnnnnnnnnnnn

SEQ ID NO: 809 - DNA, 22 bp, Artificial Sequence
  source: /note="Description of Artificial Sequence: Synthetic oligonucleotide"
  modified_base (9)..(22): a, c, t, g, unknown or other
ccwggatgnnnnnnnnnnnnnn

SEQ ID NO: 810 - DNA, 19 bp, Artificial Sequence
  source: /note="Description of Artificial Sequence: Synthetic oligonucleotide"
  modified_base (9)..(19): a, c, t, g, unknown or other
ggatgatcnnnnnnnnnnn

SEQ ID NO: 811 - DNA, 19 bp, Artificial Sequence
  source: /note="Description of Artificial Sequence: Synthetic oligonucleotide"
  modified_base (10)..(19): a, c, t, g, unknown or other
ggatggwccnnnnnnnnnn

SEQ ID NO: 812 - DNA, 24 bp, Artificial Sequence
  source: /note="Description of Artificial Sequence: Synthetic oligonucleotide"
  modified_base (11)..(24): a, c, t, g, unknown or other
ctcgaggatgnnnnnnnnnnnnnn

SEQ ID NO: 813 - DNA, 22 bp, Artificial Sequence
  source: /note="Description of Artificial Sequence: Synthetic oligonucleotide"
  modified_base (9)..(22): a, c, t, g, unknown or other
cgcggatgnnnnnnnnnnnnnn

SEQ ID NO: 814 - DNA, 19 bp, Artificial Sequence
  source: /note="Description of Artificial Sequence: Synthetic oligonucleotide"
  modified_base (9)..(19): a, c, t, g, unknown or other
ggatgcatnnnnnnnnnnn

SEQ ID NO: 815 - DNA, 22 bp, Artificial Sequence
  source: /note="Description of Artificial Sequence: Synthetic oligonucleotide"
  modified_base (9)..(22): a, c, t, g, unknown or other
ccwggatgnnnnnnnnnnnnnn

SEQ ID NO: 816 - DNA, 24 bp, Artificial Sequence
  source: /note="Description of Artificial Sequence: Synthetic oligonucleotide"
  modified_base (11)..(24): a, c, t, g, unknown or other
cycgrggatgnnnnnnnnnnnnnn

SEQ ID NO: 817 - DNA, 23 bp, Artificial Sequence
  source: /note="Description of Artificial Sequence: Synthetic oligonucleotide"
  modified_base (10)..(23): a, c, t, g, unknown or other
cycgggatgnnnnnnnnnnnnnn

SEQ ID NO: 818 - DNA, 19 bp, Artificial Sequence
  source: /note="Description of Artificial Sequence: Synthetic oligonucleotide"
  modified_base (9)..(19): a, c, t, g, unknown or other
ggatgatcnnnnnnnnnnn

SEQ ID NO: 819 - DNA, 25 bp, Artificial Sequence
  source: /note="Description of Artificial Sequence: Synthetic oligonucleotide"
  modified_base (4)..(6): a, c, t, g, unknown or other
  modified_base (13)..(25): a, c, t, g, unknown or other
ccannnggatggnnnnnnnnnnnnn

SEQ ID NO: 820 - DNA, 22 bp, Artificial Sequence
  source: /note="Description of Artificial Sequence: Synthetic oligonucleotide"
  modified_base (9)..(22): a, c, t, g, unknown or other
ccgggatgnnnnnnnnnnnnnn

SEQ ID NO: 821 - DNA, 21 bp, Artificial Sequence
  source: /note="Description of Artificial Sequence: Synthetic oligonucleotide"
  modified_base (8)..(21): a, c, t, g, unknown or other
ccggatgnnnnnnnnnnnnnn

SEQ ID NO: 822 - DNA, 22 bp, Artificial Sequence
  source: /note="Description of Artificial Sequence: Synthetic oligonucleotide"
  modified_base (9)..(22): a, c, t, g, unknown or other
ctaggatgnnnnnnnnnnnnnn

SEQ ID NO: 823 - DNA, 22 bp, Artificial Sequence
  source: /note="Description of Artificial Sequence: Synthetic oligonucleotide"
  modified_base (9)..(22): a, c, t, g, unknown or other
tccggatgnnnnnnnnnnnnnn

SEQ ID NO: 824 - DNA, 23 bp, Artificial Sequence
  source: /note="Description of Artificial Sequence: Synthetic oligonucleotide"
  modified_base (10)..(23): a, c, t, g, unknown or other
ccssggatgnnnnnnnnnnnnnn

SEQ ID NO: 825 - DNA, 23 bp, Artificial Sequence
  source: /note="Description of Artificial Sequence: Synthetic oligonucleotide"
  modified_base (10)..(23): a, c, t, g, unknown or other
cccgggatgnnnnnnnnnnnnnn

SEQ ID NO: 826 - DNA, 24 bp, Artificial Sequence
  source: /note="Description of Artificial Sequence: Synthetic oligonucleotide"
  modified_base (11)..(24): a, c, t, g, unknown or other
ccwwgggatgnnnnnnnnnnnnnn

SEQ ID NO: 827 - DNA, 23 bp, Artificial Sequence
  source: /note="Description of Artificial Sequence: Synthetic oligonucleotide"
  modified_base (10)..(23): a, c, t, g, unknown or other
ccwwggatgnnnnnnnnnnnnnn

SEQ ID NO: 828 - DNA, 23 bp, Artificial Sequence
  source: /note="Description of Artificial Sequence: Synthetic oligonucleotide"
  modified_base (10)..(23): a, c, t, g, unknown or other
ccwgggatgnnnnnnnnnnnnnn

SEQ ID NO: 829 - DNA, 22 bp, Artificial Sequence
  source: /note="Description of Artificial Sequence: Synthetic oligonucleotide"
  modified_base (9)..(22): a, c, t, g, unknown or other
ccwggatgnnnnnnnnnnnnnn

SEQ ID NO: 830 - DNA, 19 bp, Artificial Sequence
  source: /note="Description of Artificial Sequence: Synthetic oligonucleotide"
  modified_base (7)..(7): a, c, t, g, unknown or other
  modified_base (10)..(19): a, c, t, g, unknown or other
ggatggnccnnnnnnnnnn

SEQ ID NO: 831 - DNA, 22 bp, Artificial Sequence
  source: /note="Description of Artificial Sequence: Synthetic oligonucleotide"
  modified_base (9)..(22): a, c, t, g, unknown or other
ccwggatgnnnnnnnnnnnnnn

SEQ ID NO: 832 - DNA, 19 bp, Artificial Sequence
  source: /note="Description of Artificial Sequence: Synthetic oligonucleotide"
  modified_base (8)..(19): a, c, t, g, unknown or other
ggatgcannnnnnnnnnnn

SEQ ID NO: 833 - DNA, 19 bp, Artificial Sequence
  source: /note="Description of Artificial Sequence: Synthetic oligonucleotide"
  modified_base (9)..(19): a, c, t, g, unknown or other
ggatgtacnnnnnnnnnnn

SEQ ID NO: 834 - DNA, 23 bp, Artificial Sequence
  source: /note="Description of Artificial Sequence: Synthetic oligonucleotide"
  modified_base (3)..(3): a, c, t, g, unknown or other
  modified_base (10)..(23): a, c, t, g, unknown or other
ctnaggatgnnnnnnnnnnnnnn

SEQ ID NO: 835 - DNA, 22 bp, Artificial Sequence
  source: /note="Description of Artificial Sequence: Synthetic oligonucleotide"
  modified_base (3)..(3): a, c, t, g, unknown or other
  modified_base (9)..(22): a, c, t, g, unknown or other
ccnggatgnnnnnnnnnnnnnn

SEQ ID NO: 836 - DNA, 23 bp, Artificial Sequence
  source: /note="Description of Artificial Sequence: Synthetic oligonucleotide"
  modified_base (10)..(23): a, c, t, g, unknown or other
ccgcggatgnnnnnnnnnnnnnn

SEQ ID NO: 837 - DNA, 28 bp, Artificial Sequence
  source: /note="Description of Artificial Sequence: Synthetic oligonucleotide"
  modified_base (4)..(8): a, c, t, g, unknown or other
  modified_base (15)..(28): a, c, t, g, unknown or other
cctnnnnnaggatgnnnnnnnnnnnnnn

SEQ ID NO: 838 - DNA, 21 bp, Artificial Sequence
  source: /note="Description of Artificial Sequence: Synthetic oligonucleotide"
  modified_base (8)..(21): a, c, t, g, unknown or other
ccggatgnnnnnnnnnnnnnn

SEQ ID NO: 839 - DNA, 24 bp, Artificial Sequence
  source: /note="Description of Artificial Sequence: Synthetic oligonucleotide"
  modified_base (4)..(5): a, c, t, g, unknown or other
  modified_base (12)..(24): a, c, t, g, unknown or other
ccannggatggnnnnnnnnnnnnn

SEQ ID NO: 840 - DNA, 22 bp, Artificial Sequence
  source: /note="Description of Artificial Sequence: Synthetic oligonucleotide"
  modified_base (9)..(22): a, c, t, g, unknown or other
catggatgnnnnnnnnnnnnnn

SEQ ID NO: 841 - DNA, 22 bp, Artificial Sequence
  source: /note="Description of Artificial Sequence: Synthetic oligonucleotide"
  modified_base (9)..(22): a, c, t, g, unknown or other
cgcggatgnnnnnnnnnnnnnn

SEQ ID NO: 842 - DNA, 22 bp, Artificial Sequence
  source: /note="Description of Artificial Sequence: Synthetic oligonucleotide"
  modified_base (9)..(22): a, c, t, g, unknown or other
ccgggatgnnnnnnnnnnnnnn

SEQ ID NO: 843 - DNA, 21 bp, Artificial Sequence
  source: /note="Description of Artificial Sequence: Synthetic oligonucleotide"
  modified_base (8)..(21): a, c, t, g, unknown or other
ccggatgnnnnnnnnnnnnnn

SEQ ID NO: 844 - DNA, 21 bp, Artificial Sequence
  source: /note="Description of Artificial Sequence: Synthetic oligonucleotide"
  modified_base (8)..(21): a, c, t, g, unknown or other
ccggatgnnnnnnnnnnnnnn

SEQ ID NO: 845 - DNA, 21 bp, Artificial Sequence
  source: /note="Description of Artificial Sequence: Synthetic oligonucleotide"
  modified_base (8)..(21): a, c, t, g, unknown or other
ctggatgnnnnnnnnnnnnnn

SEQ ID NO: 846 - DNA, 21 bp, Artificial Sequence
  source: /note="Description of Artificial Sequence: Synthetic oligonucleotide"
  modified_base (8)..(21): a, c, t, g, unknown or other
tcggatgnnnnnnnnnnnnnn

SEQ ID NO: 847 - DNA, 22 bp, Artificial Sequence
  source: /note="Description of Artificial Sequence: Synthetic oligonucleotide"
  modified_base (3)..(3): a, c, t, g, unknown or other
  modified_base (9)..(22): a, c, t, g, unknown or other
tcnggatgnnnnnnnnnnnnnn

SEQ ID NO: 848 - DNA, 23 bp, Artificial Sequence
  source: /note="Description of Artificial Sequence: Synthetic oligonucleotide"
  modified_base (3)..(3): a, c, t, g, unknown or other
  modified_base (10)..(23): a, c, t, g, unknown or other
ctnaggatgnnnnnnnnnnnnnn

SEQ ID NO: 849 - DNA, 24 bp, Artificial Sequence
  source: /note="Description of Artificial Sequence: Synthetic oligonucleotide"
  modified_base (3)..(4): a, c, t, g, unknown or other
  modified_base (11)..(24): a, c, t, g, unknown or other
ccnngggatgnnnnnnnnnnnnnn

SEQ ID NO: 850 - DNA, 23 bp, Artificial Sequence
  source: /note="Description of Artificial Sequence: Synthetic oligonucleotide"
  modified_base (3)..(4): a, c, t, g, unknown or other
  modified_base (10)..(23): a, c, t, g, unknown or other
ccnnggatgnnnnnnnnnnnnnn

SEQ ID NO: 851 - DNA, 22 bp, Artificial Sequence
  source: /note="Description of Artificial Sequence: Synthetic oligonucleotide"
  modified_base (9)..(22): a, c, t, g, unknown or other
gaaggatgnnnnnnnnnnnnnn

SEQ ID NO: 852 - DNA, 22 bp, Artificial Sequence
  source: /note="Description of Artificial Sequence: Synthetic oligonucleotide"
  modified_base (9)..(22): a, c, t, g, unknown or other
gagggatgnnnnnnnnnnnnnn

SEQ ID NO: 853 - DNA, 21 bp, Artificial Sequence
  source: /note="Description of Artificial Sequence: Synthetic oligonucleotide"
  modified_base (8)..(21): a, c, t, g, unknown or other
gaggatgnnnnnnnnnnnnnn

SEQ ID NO: 854 - DNA, 19 bp, Artificial Sequence
  source: /note="Description of Artificial Sequence: Synthetic oligonucleotide"
  modified_base (7)..(7): a, c, t, g, unknown or other
  modified_base (10)..(19): a, c, t, g, unknown or other
ggatggnccnnnnnnnnnn

SEQ ID NO: 855 - DNA, 23 bp, Artificial Sequence
  source: /note="Description of Artificial Sequence: Synthetic oligonucleotide"
  modified_base (10)..(23): a, c, t, g, unknown or other
ccagggatgnnnnnnnnnnnnnn

SEQ ID NO: 856 - DNA, 22 bp, Artificial Sequence
  source: /note="Description of Artificial Sequence: Synthetic oligonucleotide"
  modified_base (9)..(22): a, c, t, g, unknown or other
ccaggatgnnnnnnnnnnnnnn

SEQ ID NO: 857 - DNA, 23 bp, Artificial Sequence
  source: /note="Description of Artificial Sequence: Synthetic oligonucleotide"
  modified_base (10)..(23): a, c, t, g, unknown or other
ccwgggatgnnnnnnnnnnnnnn

SEQ ID NO: 858 - DNA, 22 bp, Artificial Sequence
  source: /note="Description of Artificial Sequence: Synthetic oligonucleotide"
  modified_base (9)..(22): a, c, t, g, unknown or other
ccwggatgnnnnnnnnnnnnnn

SEQ ID NO: 859 - DNA, 19 bp, Artificial Sequence
  source: /note="Description of Artificial Sequence: Synthetic oligonucleotide"
  modified_base (11)..(19): a, c, t, g, unknown or other
ggatgctagcnnnnnnnnn

SEQ ID NO: 860 - DNA, 22 bp, Artificial Sequence
  source: /note="Description of Artificial Sequence: Synthetic oligonucleotide"
  modified_base (9)..(22): a, c, t, g, unknown or other
tctggatgnnnnnnnnnnnnnn

SEQ ID NO: 861 - DNA, 23 bp, Artificial Sequence
  source: /note="Description of Artificial Sequence: Synthetic oligonucleotide"
  modified_base (10)..(23): a, c, t, g, unknown or other
rccgggatgnnnnnnnnnnnnnn

SEQ ID NO: 862 - DNA, 23 bp, Artificial Sequence
  source: /note="Description of Artificial Sequence: Synthetic oligonucleotide"
  modified_base (10)..(23): a, c, t, g, unknown or other
tctgggatgnnnnnnnnnnnnnn

SEQ ID NO: 863 - DNA, 22 bp, Artificial Sequence
  source: /note="Description of Artificial Sequence: Synthetic oligonucleotide"
  modified_base (9)..(22): a, c, t, g, unknown or other
tctggatgnnnnnnnnnnnnnn

SEQ ID NO: 864 - DNA, 24 bp, Artificial Sequence
  source: /note="Description of Artificial Sequence: Synthetic oligonucleotide"
  modified_base (11)..(24): a, c, t, g, unknown or other
ctcgaggatgnnnnnnnnnnnnnn

SEQ ID NO: 865 - DNA, 24 bp, Artificial Sequence
  source: /note="Description of Artificial Sequence: Synthetic oligonucleotide"
  modified_base (11)..(24): a, c, t, g, unknown or other
ccatgggatgnnnnnnnnnnnnnn

SEQ ID NO: 866 - DNA, 23 bp, Artificial Sequence
  source: /note="Description of Artificial Sequence: Synthetic oligonucleotide"
  modified_base (10)..(23): a, c, t, g, unknown or other
ccatggatgnnnnnnnnnnnnnn

SEQ ID NO: 867 - DNA, 24 bp, Artificial Sequence
  source: /note="Description of Artificial Sequence: Synthetic oligonucleotide"
  modified_base (11)..(24): a, c, t, g, unknown or other
cgatcggatgnnnnnnnnnnnnnn

SEQ ID NO: 868 - DNA, 22 bp, Artificial Sequence
  source: /note="Description of Artificial Sequence: Synthetic oligonucleotide"
  modified_base (9)..(22): a, c, t, g, unknown or other
ctaggatgnnnnnnnnnnnnnn

SEQ ID NO: 869 - DNA, 24 bp, Artificial Sequence
  source: /note="Description of Artificial Sequence: Synthetic oligonucleotide"
  modified_base (11)..(24): a, c, t, g, unknown or other
ccatgggatgnnnnnnnnnnnnnn

SEQ ID NO: 870 - DNA, 23 bp, Artificial Sequence
  source: /note="Description of Artificial Sequence: Synthetic oligonucleotide"
  modified_base (10)..(23): a, c, t, g, unknown or other
ccatggatgnnnnnnnnnnnnnn

SEQ ID NO: 871 - DNA, 24 bp, Artificial Sequence
  source: /note="Description of Artificial Sequence: Synthetic oligonucleotide"
  modified_base (11)..(24): a, c, t, g, unknown or other
ccwwgggatgnnnnnnnnnnnnnn

SEQ ID NO: 872 - DNA, 23 bp, Artificial Sequence
  source: /note="Description of Artificial Sequence: Synthetic oligonucleotide"
  modified_base (10)..(23): a, c, t, g, unknown or other
ccwwggatgnnnnnnnnnnnnnn

SEQ ID NO: 873 - DNA, 23 bp, Artificial Sequence
  source: /note="Description of Artificial Sequence: Synthetic oligonucleotide"
  modified_base (4)..(4): a, c, t, g, unknown or other
  modified_base (11)..(23): a, c, t, g, unknown or other
gacnggatgcnnnnnnnnnnnnn

SEQ ID NO: 874 - DNA, 24 bp, Artificial Sequence
  source: /note="Description of Artificial Sequence: Synthetic oligonucleotide"
  modified_base (11)..(24): a, c, t, g, unknown or other
gaagaggatgnnnnnnnnnnnnnn

SEQ ID NO: 875 - DNA, 23 bp, Artificial Sequence
  source: /note="Description of Artificial Sequence: Synthetic oligonucleotide"
  modified_base (10)..(23): a, c, t, g, unknown or other
castggatgnnnnnnnnnnnnnn

SEQ ID NO: 876 - DNA, 28 bp, Artificial Sequence
  source: /note="Description of Artificial Sequence: Synthetic oligonucleotide"
  modified_base (4)..(9): a, c, t, g, unknown or other
  modified_base (16)..(28): a, c, t, g, unknown or other
ccannnnnnggatggnnnnnnnnnnnnn

SEQ ID NO: 877 - DNA, 23 bp, Artificial Sequence
  source: /note="Description of Artificial Sequence: Synthetic oligonucleotide"
  modified_base (10)..(23): a, c, t, g, unknown or other
actgggatgnnnnnnnnnnnnnn

SEQ ID NO: 878 - DNA, 22 bp, Artificial Sequence
  source: /note="Description of Artificial Sequence: Synthetic oligonucleotide"
  modified_base (9)..(22): a, c, t, g, unknown or other
actggatgnnnnnnnnnnnnnn

SEQ ID NO: 879 - DNA, 23 bp, Artificial Sequence
  source: /note="Description of Artificial Sequence: Synthetic oligonucleotide"
  modified_base (10)..(23): a, c, t, g, unknown or other
cacgggatgnnnnnnnnnnnnnn

SEQ ID NO: 880 - DNA, 19 bp, Artificial Sequence
  source: /note="Description of Artificial Sequence: Synthetic oligonucleotide"
  modified_base (7)..(19): a, c, t, g, unknown or other
ggatggnnnnnnnnnnnnn

SEQ ID NO: 881 - DNA, 22 bp, Artificial Sequence
  source: /note="Description of Artificial Sequence: Synthetic oligonucleotide"
  modified_base (9)..(22): a, c, t, g, unknown or other
ccsggatgnnnnnnnnnnnnnn

SEQ ID NO: 882 - DNA, 23 bp, Artificial Sequence
  source: /note="Description of Artificial Sequence: Synthetic oligonucleotide"
  modified_base (10)..(23): a, c, t, g, unknown or other
actgggatgnnnnnnnnnnnnnn

SEQ ID NO: 883 - DNA, 19 bp, Artificial Sequence
  source: /note="Description of Artificial Sequence: Synthetic oligonucleotide"
  modified_base (7)..(19): a, c, t, g, unknown or other
ggatgcnnnnnnnnnnnnn

SEQ ID NO: 884 - DNA, 22 bp, Artificial Sequence
  source: /note="Description of Artificial Sequence: Synthetic oligonucleotide"
  modified_base (9)..(22): a, c, t, g, unknown or other
gcgggatgnnnnnnnnnnnnnn

SEQ ID NO: 885 - DNA, 21 bp, Artificial Sequence
  source: /note="Description of Artificial Sequence: Synthetic oligonucleotide"
  modified_base (8)..(21): a, c, t, g, unknown or other
gcggatgnnnnnnnnnnnnnn

SEQ ID NO: 886 - DNA, 19 bp, Artificial Sequence
  source: /note="Description of Artificial Sequence: Synthetic oligonucleotide"
  modified_base (7)..(19): a, c, t, g, unknown or other
ggatgcnnnnnnnnnnnnn

SEQ ID NO: 887 - DNA, 19 bp, Artificial Sequence
  source: /note="Description of Artificial Sequence: Synthetic oligonucleotide"
  modified_base (7)..(19): a, c, t, g, unknown or other
ggatggnnnnnnnnnnnnn

SEQ ID NO: 888 - DNA, 21 bp, Artificial Sequence
  source: /note="Description of Artificial Sequence: Synthetic oligonucleotide"
  modified_base (8)..(21): a, c, t, g, unknown or other
grggatgnnnnnnnnnnnnnn

SEQ ID NO: 889 - DNA, 23 bp, Artificial Sequence
  source: /note="Description of Artificial Sequence: Synthetic oligonucleotide"
  modified_base (10)..(23): a, c, t, g, unknown or other
gaagggatgnnnnnnnnnnnnnn

SEQ ID NO: 890 - DNA, 22 bp, Artificial Sequence
  source: /note="Description of Artificial Sequence: Synthetic oligonucleotide"
  modified_base (9)..(22): a, c, t, g, unknown or other
gaaggatgnnnnnnnnnnnnnn

SEQ ID NO: 891 - DNA, 19 bp, Artificial Sequence
  source: /note="Description of Artificial Sequence: Synthetic oligonucleotide"
  modified_base (7)..(19): a, c, t, g, unknown or other
ggatggnnnnnnnnnnnnn

SEQ ID NO: 892 - DNA, 19 bp, Artificial Sequence
  source: /note="Description of Artificial Sequence: Synthetic oligonucleotide"
  modified_base (7)..(19): a, c, t, g, unknown or other
ggatgcnnnnnnnnnnnnn

SEQ ID NO: 893 - DNA, 22 bp, Artificial Sequence
  source: /note="Description of Artificial Sequence: Synthetic oligonucleotide"
  modified_base (9)..(22): a, c, t, g, unknown or other
gagggatgnnnnnnnnnnnnnn

SEQ ID NO: 894 - DNA, 21 bp, Artificial Sequence
  source: /note="Description of Artificial Sequence: Synthetic oligonucleotide"
  modified_base (8)..(21): a, c, t, g, unknown or other
gaggatgnnnnnnnnnnnnnn

SEQ ID NO: 895 - DNA, 17 bp, Artificial Sequence
  source: /note="Description of Artificial Sequence: Synthetic oligonucleotide"
  modified_base (10)..(17): a, c, t, g, unknown or other
ttaacctgcnnnnnnnn

SEQ ID NO: 896 - DNA, 14 bp, Artificial Sequence
  source: /note="Description of Artificial Sequence: Synthetic oligonucleotide"
  modified_base (11)..(14): a, c, t, g, unknown or other
acctgccwggnnnn

SEQ ID NO: 897 - DNA, 17 bp, Artificial Sequence
  source: /note="Description of Artificial Sequence: Synthetic oligonucleotide"
  modified_base (10)..(17): a, c, t, g, unknown or other
ggtacctgcnnnnnnnn

SEQ ID NO: 898 - DNA, 14 bp, Artificial Sequence
  source: /note="Description of Artificial Sequence: Synthetic oligonucleotide"
  modified_base (9)..(14): a, c, t, g, unknown or other
acctgcagnnnnnn

SEQ ID NO: 899 - DNA, 18 bp, Artificial Sequence
  source: /note="Description of Artificial Sequence: Synthetic oligonucleotide"
  modified_base (11)..(18): a, c, t, g, unknown or other
gtmkacctgcnnnnnnnn

SEQ ID NO: 900 - DNA, 14 bp, Artificial Sequence
  source: /note="Description of Artificial Sequence: Synthetic oligonucleotide"
  modified_base (9)..(14): a, c, t, g, unknown or other
acctgcggnnnnnn

SEQ ID NO: 901 - DNA, 14 bp, Artificial Sequence
  source: /note="Description of Artificial Sequence: Synthetic oligonucleotide"
  modified_base (10)..(14): a, c, t, g, unknown or other
acctgccgcnnnnn

SEQ ID NO: 902 - DNA, 14 bp, Artificial Sequence
  source: /note="Description of Artificial Sequence: Synthetic oligonucleotide"
  modified_base (9)..(14): a, c, t, g, unknown or other
acctgcagnnnnnn

SEQ ID NO: 903 - DNA, 18 bp, Artificial Sequence
  source: /note="Description of Artificial Sequence: Synthetic oligonucleotide"
  modified_base (11)..(18): a, c, t, g, unknown or other
ttsaacctgcnnnnnnnn

SEQ ID NO: 904 - DNA, 15 bp, Artificial Sequence
  source: /note="Description of Artificial Sequence: Synthetic oligonucleotide"
  modified_base (8)..(8): a, c, t, g, unknown or other
  modified_base (12)..(15): a, c, t, g, unknown or other
gacctgcngtcnnnn

SEQ ID NO: 905 - DNA, 17 bp, Artificial Sequence
  source: /note="Description of Artificial Sequence: Synthetic oligonucleotide"
  modified_base (10)..(17): a, c, t, g, unknown or other
gagacctgcnnnnnnnn

SEQ ID NO: 906 - DNA, 18 bp, Artificial Sequence
  source: /note="Description of Artificial Sequence: Synthetic oligonucleotide"
  modified_base (11)..(18): a, c, t, g, unknown or other
gtcgacctgcnnnnnnnn

SEQ ID NO: 907 - DNA, 14 bp, Artificial Sequence
  source: /note="Description of Artificial Sequence: Synthetic oligonucleotide"
  modified_base (9)..(14): a, c, t, g, unknown or other
acctgcagnnnnnn

SEQ ID NO: 908 - DNA, 14 bp, Artificial Sequence
  source: /note="Description of Artificial Sequence: Synthetic oligonucleotide"
  modified_base (11)..(14): a, c, t, g, unknown or other
acctgccggynnnn

SEQ ID NO: 909 - DNA, 14 bp, Artificial Sequence
  source: /note="Description of Artificial Sequence: Synthetic oligonucleotide"
  modified_base (10)..(14): a, c, t, g, unknown or other
acctgcwgcnnnnn

SEQ ID NO: 910 - DNA, 16 bp, Artificial Sequence
  source: /note="Description of Artificial Sequence: Synthetic oligonucleotide"
  modified_base (9)..(16): a, c, t, g, unknown or other
ggacctgcnnnnnnnn

SEQ ID NO: 911 - DNA, 14 bp, Artificial Sequence
  source: /note="Description of Artificial Sequence: Synthetic oligonucleotide"
  modified_base (10)..(14): a, c, t, g, unknown or other
acctgctgcnnnnn

SEQ ID NO: 912 - DNA, 14 bp, Artificial Sequence
  source: /note="Description of Artificial Sequence: Synthetic oligonucleotide"
  modified_base (10)..(14): a, c, t, g, unknown or other
acctgcagcnnnnn

SEQ ID NO: 913 - DNA, 18 bp, Artificial Sequence
  source: /note="Description of Artificial Sequence: Synthetic oligonucleotide"
  modified_base (11)..(18): a, c, t, g, unknown or other
gtwwacctgcnnnnnnnn

SEQ ID NO: 914 - DNA, 16 bp, Artificial Sequence
  source: /note="Description of Artificial Sequence: Synthetic oligonucleotide"
  modified_base (9)..(16): a, c, t, g, unknown or other
ggacctgcnnnnnnnn

SEQ ID NO: 915 - DNA, 14 bp, Artificial Sequence
  source: /note="Description of Artificial Sequence: Synthetic oligonucleotide"
  modified_base (10)..(14): a, c, t, g, unknown or other
acctgcgcgnnnnn

SEQ ID NO: 916 - DNA, 19 bp, Artificial Sequence
  source: /note="Description of Artificial Sequence: Synthetic oligonucleotide"
  modified_base (12)..(19): a, c, t, g, unknown or other
tttaaacctgcnnnnnnnn

SEQ ID NO: 917 - DNA, 18 bp, Artificial Sequence
  source: /note="Description of Artificial Sequence: Synthetic oligonucleotide"
  modified_base (4)..(4): a, c, t, g, unknown or other
  modified_base (11)..(18): a, c, t, g, unknown or other
ggtnacctgcnnnnnnnn

SEQ ID NO: 918 - DNA, 16 bp, Artificial Sequence
  source: /note="Description of Artificial Sequence: Synthetic oligonucleotide"
  modified_base (9)..(9): a, c, t, g, unknown or other
  modified_base (13)..(16): a, c, t, g, unknown or other
ccacctgcntggnnnn

SEQ ID NO: 919 - DNA, 14 bp, Artificial Sequence
  source: /note="Description of Artificial Sequence: Synthetic oligonucleotide"
  modified_base (10)..(14): a, c, t, g, unknown or other
acctgccggnnnnn

SEQ ID NO: 920 - DNA, 14 bp, Artificial Sequence
  source: /note="Description of Artificial Sequence: Synthetic oligonucleotide"
  modified_base (10)..(14): a, c, t, g, unknown or other
acctgctagnnnnn

SEQ ID NO: 921 - DNA, 14 bp, Artificial Sequence
  source: /note="Description of Artificial Sequence: Synthetic oligonucleotide"
  modified_base (7)..(8): a, c, t, g, unknown or other
  modified_base (11)..(14): a, c, t, g, unknown or other
acctgcnngcnnnn

SEQ ID NO: 922 - DNA, 19 bp, Artificial Sequence
  source: /note="Description of Artificial Sequence: Synthetic oligonucleotide"
  modified_base (12)..(19): a, c, t, g, unknown or other
ttcgaacctgcnnnnnnnn

SEQ ID NO: 923 - DNA, 19 bp, Artificial Sequence
  source: /note="Description of Artificial Sequence: Synthetic oligonucleotide"
  modified_base (12)..(19): a, c, t, g, unknown or other
tccggacctgcnnnnnnnn

SEQ ID NO: 924 - DNA, 14 bp, Artificial Sequence
  source: /note="Description of Artificial Sequence: Synthetic oligonucleotide"
  modified_base (7)..(7): a, c, t, g, unknown or other
  modified_base (10)..(14): a, c, t, g, unknown or other
acctgcngcnnnnn

SEQ ID NO: 925 - DNA, 19 bp, Artificial Sequence
  source: /note="Description of Artificial Sequence: Synthetic oligonucleotide"
  modified_base (12)..(19): a, c, t, g, unknown or other
caaaaacctgcnnnnnnnn

SEQ ID NO: 926 - DNA, 14 bp, Artificial Sequence
  source: /note="Description of Artificial Sequence: Synthetic oligonucleotide"
  modified_base (11)..(14): a, c, t, g, unknown or other
acctgccwggnnnn

SEQ ID NO: 927 - DNA, 18 bp, Artificial Sequence
  source: /note="Description of Artificial Sequence: Synthetic oligonucleotide"
  modified_base (11)..(18): a, c, t, g, unknown or other
gtyracctgcnnnnnnnn

SEQ ID NO: 928 - DNA, 16 bp, Artificial Sequence
  source: /note="Description of Artificial Sequence: Synthetic oligonucleotide"
  modified_base (9)..(16): a, c, t, g, unknown or other
ggacctgcnnnnnnnn

SEQ ID NO: 929 - DNA, 18 bp, Artificial Sequence
  source: /note="Description of Artificial Sequence: Synthetic oligonucleotide"
  modified_base (11)..(18): a, c, t, g, unknown or other
gtatacctgcnnnnnnnn

SEQ ID NO: 930 - DNA, 14 bp, Artificial Sequence
  source: /note="Description of Artificial Sequence: Synthetic oligonucleotide"
  modified_base (11)..(14): a, c, t, g, unknown or other
acctgccggcnnnn

SEQ ID NO: 931 - DNA, 16 bp, Artificial Sequence
  source: /note="Description of Artificial Sequence: Synthetic oligonucleotide"
  modified_base (9)..(16): a, c, t, g, unknown or other
gtacctgcnnnnnnnn

SEQ ID NO: 932 - DNA, 17 bp, Artificial Sequence
  source: /note="Description of Artificial Sequence: Synthetic oligonucleotide"
  modified_base (10)..(17): a, c, t, g, unknown or other
tcgacctgcnnnnnnnn

SEQ ID NO: 933 - DNA, 17 bp, Artificial Sequence
  source: /note="Description of Artificial Sequence: Synthetic oligonucleotide"
  modified_base (10)..(17): a, c, t, g, unknown or other
tgcacctgcnnnnnnnn

SEQ ID NO: 934 - DNA, 14 bp, Artificial Sequence
  source: /note="Description of Artificial Sequence: Synthetic oligonucleotide"
  modified_base (8)..(14): a, c, t, g, unknown or other
acctgcannnnnnn

SEQ ID NO: 935 - DNA, 16 bp, Artificial Sequence
  source: /note="Description of Artificial Sequence: Synthetic oligonucleotide"
  modified_base (9)..(16): a, c, t, g, unknown or other
gtacctgcnnnnnnnn

SEQ ID NO: 936 - DNA, 14 bp, Artificial Sequence
  source: /note="Description of Artificial Sequence: Synthetic oligonucleotide"
  modified_base (8)..(8): a, c, t, g, unknown or other
  modified_base (11)..(14): a, c, t, g, unknown or other
acctgctnagnnnn

SEQ ID NO: 937 - DNA, 14 bp, Artificial Sequence
  source: /note="Description of Artificial Sequence: Synthetic oligonucleotide"
  modified_base (9)..(14): a, c, t, g, unknown or other
acctgcagnnnnnn

SEQ ID NO: 938 - DNA, 17 bp, Artificial Sequence
  source: /note="Description of Artificial Sequence: Synthetic oligonucleotide"
  modified_base (10)..(17): a, c, t, g, unknown or other
rggacctgcnnnnnnnn

SEQ ID NO: 939 - DNA, 16 bp, Artificial Sequence
  source: /note="Description of Artificial Sequence: Synthetic oligonucleotide"
  modified_base (12)..(16): a, c, t, g, unknown or other
ccacctgctggnnnnn

SEQ ID NO: 940 - DNA, 14 bp, Artificial Sequence
  source: /note="Description of Artificial Sequence: Synthetic oligonucleotide"
  modified_base (10)..(14): a, c, t, g, unknown or other
acctgcatgnnnnn

SEQ ID NO: 941 - DNA, 14 bp, Artificial Sequence
  source: /note="Description of Artificial Sequence: Synthetic oligonucleotide"
  modified_base (10)..(14): a, c, t, g, unknown or other
acctgcgcgnnnnn

SEQ ID NO: 942 - DNA, 14 bp, Artificial Sequence
  source: /note="Description of Artificial Sequence: Synthetic oligonucleotide"
  modified_base (10)..(14): a, c, t, g, unknown or other
acctgccggnnnnn

SEQ ID NO: 943 - DNA, 17 bp, Artificial Sequence
  source: /note="Description of Artificial Sequence: Synthetic oligonucleotide"
  modified_base (10)..(17): a, c, t, g, unknown or other
ggyacctgcnnnnnnnn

SEQ ID NO: 944 - DNA, 14 bp, Artificial Sequence
  source: /note="Description of Artificial Sequence: Synthetic oligonucleotide"
  modified_base (9)..(14): a, c, t, g, unknown or other
acctgcgcnnnnnn

SEQ ID NO: 945 - DNA, 14 bp, Artificial Sequence
  source: /note="Description of Artificial Sequence: Synthetic oligonucleotide"
  modified_base (11)..(14): a, c, t, g, unknown or other
acctgcwgcknnnn

SEQ ID NO: 946 - DNA, 18 bp, Artificial Sequence
  source: /note="Description of Artificial Sequence: Synthetic oligonucleotide"
  modified_base (11)..(18): a, c, t, g, unknown or other
gttaacctgcnnnnnnnn

SEQ ID NO: 947 - DNA, 18 bp, Artificial Sequence
  source: /note="Description of Artificial Sequence: Synthetic oligonucleotide"
  modified_base (3)..(3): a, c, t, g, unknown or other
  modified_base (11)..(18): a, c, t, g, unknown or other
tcngacctgcnnnnnnnn

SEQ ID NO: 948 - DNA, 18 bp, Artificial Sequence
  source: /note="Description of Artificial Sequence: Synthetic oligonucleotide"
  modified_base (3)..(4): a, c, t, g, unknown or other
  modified_base (11)..(18): a, c, t, g, unknown or other
gtnnacctgcnnnnnnnn

SEQ ID NO: 949 - DNA, 19 bp, Artificial Sequence
  source: /note="Description of Artificial Sequence: Synthetic oligonucleotide"
  modified_base (3)..(4): a, c, t, g, unknown or other
  modified_base (12)..(19): a, c, t, g, unknown or other
tcnngacctgcnnnnnnnn

SEQ ID NO: 950 - DNA, 14 bp, Artificial Sequence
  source: /note="Description of Artificial Sequence: Synthetic oligonucleotide"
  modified_base (8)..(8): a, c, t, g, unknown or other
  modified_base (11)..(14): a, c, t, g, unknown or other
acctgctnagnnnn

SEQ ID NO: 951 - DNA, 14 bp, Artificial Sequence
  source: /note="Description of Artificial Sequence: Synthetic oligonucleotide"
  modified_base (9)..(14): a, c, t, g, unknown or other
acctgcagnnnnnn

SEQ ID NO: 952 - DNA, 17 bp, Artificial Sequence
  source: /note="Description of Artificial Sequence: Synthetic oligonucleotide"
  modified_base (10)..(17): a, c, t, g, unknown or other
gtsacctgcnnnnnnnn

SEQ ID NO: 953 - DNA, 14 bp, Artificial Sequence
  source: /note="Description of Artificial Sequence: Synthetic oligonucleotide"
  modified_base (10)..(14): a, c, t, g, unknown or other
acctgcctcnnnnn

SEQ ID NO: 954 - DNA, 18 bp, Artificial Sequence
  source: /note="Description of Artificial Sequence: Synthetic oligonucleotide"
  modified_base (11)..(18): a, c, t, g, unknown or other
ggwgacctgcnnnnnnnn

SEQ ID NO: 955 - DNA, 16 bp, Artificial Sequence
  source: /note="Description of Artificial Sequence: Synthetic oligonucleotide"
  modified_base (9)..(16): a, c, t, g, unknown or other
ggacctgcnnnnnnnn

SEQ ID NO: 956 - DNA, 16 bp, Artificial Sequence
  source: /note="Description of Artificial Sequence: Synthetic oligonucleotide"
  modified_base (9)..(16): a, c, t, g, unknown or other
ggacctgcnnnnnnnn

SEQ ID NO: 957 - DNA, 14 bp, Artificial Sequence
  source: /note="Description of Artificial Sequence: Synthetic oligonucleotide"
  modified_base (11)..(14): a, c, t, g, unknown or other
acctgcctggnnnn

SEQ ID NO: 958 - DNA, 14 bp, Artificial Sequence
  source: /note="Description of Artificial Sequence: Synthetic oligonucleotide"
  modified_base (11)..(14): a, c, t, g, unknown or other
acctgccwggnnnn

SEQ ID NO: 959 - DNA, 17 bp, Artificial Sequence
  source: /note="Description of Artificial Sequence: Synthetic oligonucleotide"
  modified_base (3)..(3): a, c, t, g, unknown or other
  modified_base (10)..(17): a, c, t, g, unknown or other
ggnacctgcnnnnnnnn

SEQ ID NO: 960 - DNA, 14 bp, Artificial Sequence
  source: /note="Description of Artificial Sequence: Synthetic oligonucleotide"
  modified_base (11)..(14): a, c, t, g, unknown or other
acctgctagcnnnn

SEQ ID NO: 961 - DNA, 14 bp, Artificial Sequence
  source: /note="Description of Artificial Sequence: Synthetic oligonucleotide"
  modified_base (11)..(14): a, c, t, g, unknown or other
acctgcgcgcnnnn

SEQ ID NO: 962 - DNA, 14 bp, Artificial Sequence
  source: /note="Description of Artificial Sequence: Synthetic oligonucleotide"
  modified_base (11)..(14): a, c, t, g, unknown or other
acctgccggbnnnn

SEQ ID NO: 963 - DNA, 14 bp, Artificial Sequence
  source: /note="Description of Artificial Sequence: Synthetic oligonucleotide"
  modified_base (11)..(14): a, c, t, g, unknown or other
acctgccagannnn

SEQ ID NO: 964 - DNA, 14 bp, Artificial Sequence
  source: /note="Description of Artificial Sequence: Synthetic oligonucleotide"
  modified_base (11)..(14): a, c, t, g, unknown or other
acctgcatgynnnn

SEQ ID NO: 965 - DNA, 14 bp, Artificial Sequence
  source: /note="Description of Artificial Sequence: Synthetic oligonucleotide"
  modified_base (10)..(14): a, c, t, g, unknown or other
acctgctagnnnnn

SEQ ID NO: 966 - DNA, 19 bp, Artificial Sequence
  source: /note="Description of Artificial Sequence: Synthetic oligonucleotide"
  modified_base (12)..(19): a, c, t, g, unknown or other
tctagacctgcnnnnnnnn

SEQ ID NO: 967 - DNA, 15 bp, Artificial Sequence
  source: /note="Description of Artificial Sequence: Synthetic oligonucleotide"
  modified_base (11)..(15): a, c, t, g, unknown or other
gacctgctgcnnnnn

SEQ ID NO: 968 - DNA, 18 bp, Artificial Sequence
  source: /note="Description of Artificial Sequence: Synthetic oligonucleotide"
  modified_base (4)..(4): a, c, t, g, unknown or other
  modified_base (11)..(18): a, c, t, g, unknown or other
gacnacctgcnnnnnnnn

SEQ ID NO: 969 - DNA, 14 bp, Artificial Sequence
  source: /note="Description of Artificial Sequence: Synthetic oligonucleotide"
  modified_base (11)..(14): a, c, t, g, unknown or other
acctgcastgnnnn

SEQ ID NO: 970 - DNA, 14 bp, Artificial Sequence
  source: /note="Description of Artificial Sequence: Synthetic oligonucleotide"
  modified_base (11)..(14): a, c, t, g, unknown or other
acctgcgcgcnnnn

SEQ ID NO: 971 - DNA, 14 bp, Artificial Sequence
  source: /note="Description of Artificial Sequence: Synthetic oligonucleotide"
  modified_base (11)..(14): a, c, t, g, unknown or other
acctgccagtnnnn

SEQ ID NO: 972 - DNA, 14 bp, Artificial Sequence
  source: /note="Description of Artificial Sequence: Synthetic oligonucleotide"
  modified_base (10)..(14): a, c, t, g, unknown or other
acctgccgcnnnnn

SEQ ID NO: 973 - DNA, 17 bp, Artificial Sequence
  source: /note="Description of Artificial Sequence: Synthetic oligonucleotide"
  modified_base (10)..(17): a, c, t, g, unknown or other
gagacctgcnnnnnnnn

SEQ ID NO: 974 - DNA, 14 bp, Artificial Sequence
  source: /note="Description of Artificial Sequence: Synthetic oligonucleotide"
  modified_base (10)..(14): a, c, t, g, unknown or other
acctgcgtcnnnnn

SEQ ID NO: 975 - DNA, 18 bp, Artificial Sequence
  source: /note="Description of Artificial Sequence: Synthetic oligonucleotide"
  modified_base (11)..(18): a, c, t, g, unknown or other
grrgacctgcnnnnnnnn

SEQ ID NO: 976 - DNA, 18 bp, Artificial Sequence
  source: /note="Description of Artificial Sequence: Synthetic oligonucleotide"
  modified_base (11)..(18): a, c, t, g, unknown or other
gaagacctgcnnnnnnnn

SEQ ID NO: 977 - DNA, 14 bp, Artificial Sequence
  source: /note="Description of Artificial Sequence: Synthetic oligonucleotide"
  modified_base (11)..(14): a, c, t, g, unknown or other
acctgccttcnnnn

SEQ ID NO: 978 - DNA, 14 bp, Artificial Sequence
  source: /note="Description of Artificial Sequence: Synthetic oligonucleotide"
  modified_base (10)..(14): a, c, t, g, unknown or other
acctgccgtnnnnn

SEQ ID NO: 979 - DNA, 18 bp, Artificial Sequence
  source: /note="Description of Artificial Sequence: Synthetic oligonucleotide"
  modified_base (11)..(18): a, c, t, g, unknown or other
ggtgacctgcnnnnnnnn

SEQ ID NO: 980 - DNA, 14 bp, Artificial Sequence
  source: /note="Description of Artificial Sequence: Synthetic oligonucleotide"
  modified_base (10)..(14): a, c, t, g, unknown or other
acctgcctcnnnnn

SEQ ID NO: 981 - DNA, 17 bp, Artificial Sequence
  source: /note="Description of Artificial Sequence: Synthetic oligonucleotide"
  modified_base (10)..(17): a, c, t, g, unknown or other
gggacctgcnnnnnnnn

SEQ ID NO: 982 - DNA, 17 bp, Artificial Sequence
  source: /note="Description of Artificial Sequence: Synthetic oligonucleotide"
  modified_base (11)..(17): a, c, t, g, unknown or other
cagctccwggnnnnnnn

SEQ ID NO: 983 - DNA, 20 bp, Artificial Sequence
  source: /note="Description of Artificial Sequence: Synthetic oligonucleotide"
  modified_base (10)..(20): a, c, t, g, unknown or other
ctkcagctcnnnnnnnnnnn

SEQ ID NO: 984 - DNA, 17 bp, Artificial Sequence
  source: /note="Description of Artificial Sequence: Synthetic oligonucleotide"
  modified_base (10)..(17): a, c, t, g, unknown or other
cagctccgcnnnnnnnn

SEQ ID NO: 985 - DNA, 20 bp, Artificial Sequence
  source: /note="Description of Artificial Sequence: Synthetic oligonucleotide"
  modified_base (10)..(20): a, c, t, g, unknown or other
ctgcagctcnnnnnnnnnnn

SEQ ID NO: 986 - DNA, 17 bp, Artificial Sequence
  source: /note="Description of Artificial Sequence: Synthetic oligonucleotide"
  modified_base (12)..(17): a, c, t, g, unknown or other
cagctcggccgnnnnnn

SEQ ID NO: 987 - DNA, 20 bp, Artificial Sequence
  source: /note="Description of Artificial Sequence: Synthetic oligonucleotide"
  modified_base (10)..(20): a, c, t, g, unknown or other
ctgcagctcnnnnnnnnnnn

SEQ ID NO: 988 - DNA, 17 bp, Artificial Sequence
  source: /note="Description of Artificial Sequence: Synthetic oligonucleotide"
  modified_base (10)..(17): a, c, t, g, unknown or other
cagctcgrgnnnnnnnn

SEQ ID NO: 989 - DNA, 17 bp, Artificial Sequence
  source: /note="Description of Artificial Sequence: Synthetic oligonucleotide"
  modified_base (12)..(17): a, c, t, g, unknown or other
cagctcycgrgnnnnnn

SEQ ID NO: 990 - DNA, 17 bp, Artificial Sequence
  source: /note="Description of Artificial Sequence: Synthetic oligonucleotide"
  modified_base (10)..(17): a, c, t, g, unknown or other
cagctcgagnnnnnnnn

SEQ ID NO: 991 - DNA, 20 bp, Artificial Sequence
  source: /note="Description of Artificial Sequence: Synthetic oligonucleotide"
  modified_base (10)..(20): a, c, t, g, unknown or other
gatcagctcnnnnnnnnnnn

SEQ ID NO: 992 - DNA, 18 bp, Artificial Sequence
  source: /note="Description of Artificial Sequence: Synthetic oligonucleotide"
  modified_base (8)..(18): a, c, t, g, unknown or other
gcagctcnnnnnnnnnnn

SEQ ID NO: 993 - DNA, 18 bp, Artificial Sequence
  source: /note="Description of Artificial Sequence: Synthetic oligonucleotide"
  modified_base (8)..(18): a, c, t, g, unknown or other
gcagctcnnnnnnnnnnn

SEQ ID NO: 994 - DNA, 21 bp, Artificial Sequence
  source: /note="Description of Artificial Sequence: Synthetic oligonucleotide"
  modified_base (11)..(21): a, c, t, g, unknown or other
ggwccagctcnnnnnnnnnnn

SEQ ID NO: 995 - DNA, 17 bp, Artificial Sequence
  source: /note="Description of Artificial Sequence: Synthetic oligonucleotide"
  modified_base (10)..(17): a, c, t, g, unknown or other
cagctcgagnnnnnnnn

SEQ ID NO: 996 - DNA, 17 bp, Artificial Sequence
  source: /note="Description of Artificial Sequence: Synthetic oligonucleotide"
  modified_base (12)..(17): a, c, t, g, unknown or other
cagctctcgagnnnnnn

SEQ ID NO: 997 - DNA, 17 bp, Artificial Sequence
  source: /note="Description of Artificial Sequence: Synthetic oligonucleotide"
  modified_base (10)..(17): a, c, t, g, unknown or other
cagctcgcgnnnnnnnn

SEQ ID NO: 998 - DNA, 17 bp, Artificial Sequence
  source: /note="Description of Artificial Sequence: Synthetic oligonucleotide"
  modified_base (10)..(17): a, c, t, g, unknown or other
cagctcgrgnnnnnnnn

SEQ ID NO: 999 - DNA, 17 bp, Artificial Sequence
  source: /note="Description of Artificial Sequence: Synthetic oligonucleotide"
  modified_base (12)..(17): a, c, t, g, unknown or other
cagctcycgrgnnnnnn

SEQ ID NO: 1000 - DNA, 20 bp, Artificial Sequence
  source: /note="Description of Artificial Sequence: Synthetic oligonucleotide"
  modified_base (10)..(20): a, c, t, g, unknown or other
gatcagctcnnnnnnnnnnn

SEQ ID NO: 1001 - DNA, 18 bp, Artificial Sequence
  source: /note="Description of Artificial Sequence: Synthetic oligonucleotide"
  modified_base (8)..(9): a, c, t, g, unknown or other
  modified_base (13)..(18): a, c, t, g, unknown or other
ccagctcnntggnnnnnn

SEQ ID NO: 1002 - DNA, 17 bp, Artificial Sequence
  source: /note="Description of Artificial Sequence: Synthetic oligonucleotide"
  modified_base (10)..(17): a, c, t, g, unknown or other
cagctccggnnnnnnnn

SEQ ID NO: 1003 - DNA, 17 bp, Artificial Sequence
  source: /note="Description of Artificial Sequence: Synthetic oligonucleotide"
  modified_base (10)..(17): a, c, t, g, unknown or other
cagctctagnnnnnnnn

SEQ ID NO: 1004 - DNA, 19 bp, Artificial Sequence
  source: /note="Description of Artificial Sequence: Synthetic oligonucleotide"
  modified_base (9)..(19): a, c, t, g, unknown or other
gccagctcnnnnnnnnnnn

SEQ ID NO: 1005 - DNA, 17 bp, Artificial Sequence
  source: /note="Description of Artificial Sequence: Synthetic oligonucleotide"
  modified_base (9)..(17): a, c, t, g, unknown or other
cagctcgcnnnnnnnnn

SEQ ID NO: 1006 - DNA, 17 bp, Artificial Sequence
  source: /note="Description of Artificial Sequence: Synthetic oligonucleotide"
  modified_base (11)..(17): a, c, t, g, unknown or other
cagctccggannnnnnn

SEQ ID NO: 1007 - DNA, 18 bp, Artificial Sequence
  source: /note="Description of Artificial Sequence: Synthetic oligonucleotide"
  modified_base (8)..(18): a, c, t, g, unknown or other
gcagctcnnnnnnnnnnn

SEQ ID NO: 1008 - DNA, 17 bp, Artificial Sequence
  source: /note="Description of Artificial Sequence: Synthetic oligonucleotide"
  modified_base (12)..(17): a, c, t, g, unknown or other
cagctccwwggnnnnnn

SEQ ID NO: 1009 - DNA, 17 bp, Artificial Sequence
  source: /note="Description of Artificial Sequence: Synthetic oligonucleotide"
  modified_base (11)..(17): a, c, t, g, unknown or other
cagctccwggnnnnnnn

SEQ ID NO: 1010 - DNA, 21 bp, Artificial Sequence
  source: /note="Description of Artificial Sequence: Synthetic oligonucleotide"
  modified_base (3)..(3): a, c, t, g, unknown or other
  modified_base (11)..(21): a, c, t, g, unknown or other
ggnccagctcnnnnnnnnnnn

SEQ ID NO: 1011 - DNA, 20 bp, Artificial Sequence
  source: /note="Description of Artificial Sequence: Synthetic oligonucleotide"
  modified_base (10)..(20): a, c, t, g, unknown or other
ctycagctcnnnnnnnnnnn

SEQ ID NO: 1012 - DNA, 17 bp, Artificial Sequence
  source: /note="Description of Artificial Sequence: Synthetic oligonucleotide"
  modified_base (9)..(17): a, c, t, g, unknown or other
cagctcgannnnnnnnn

SEQ ID NO: 1013 - DNA, 19 bp, Artificial Sequence
  source: /note="Description of Artificial Sequence: Synthetic oligonucleotide"
  modified_base (9)..(19): a, c, t, g, unknown or other
tgcagctcnnnnnnnnnnn

SEQ ID NO: 1014 - DNA, 20 bp, Artificial Sequence
  source: /note="Description of Artificial Sequence: Synthetic oligonucleotide"
  modified_base (10)..(20): a, c, t, g, unknown or other
gtacagctcnnnnnnnnnnn

SEQ ID NO: 1015 - DNA, 19 bp, Artificial Sequence
  source: /note="Description of Artificial Sequence: Synthetic oligonucleotide"
  modified_base (9)..(19): a, c, t, g, unknown or other
ctcagctcnnnnnnnnnnn

SEQ ID NO: 1016 - DNA, 17 bp, Artificial Sequence
  source: /note="Description of Artificial Sequence: Synthetic oligonucleotide"
  modified_base (9)..(17): a, c, t, g, unknown or other
cagctcagnnnnnnnnn

SEQ ID NO: 1017 - DNA, 17 bp, Artificial Sequence
  source: /note="Description of Artificial Sequence: Synthetic oligonucleotide"
  modified_base (8)..(8): a, c, t, g, unknown or other
  modified_base (11)..(17): a, c, t, g, unknown or other
cagctctnagnnnnnnn

SEQ ID NO: 1018 - DNA, 20 bp, Artificial Sequence
  source: /note="Description of Artificial Sequence: Synthetic oligonucleotide"
  modified_base (3)..(3): a, c, t, g, unknown or other
  modified_base (10)..(20): a, c, t, g, unknown or other
ctncagctcnnnnnnnnnnn

SEQ ID NO: 1019 - DNA, 17 bp, Artificial Sequence
  source: /note="Description of Artificial Sequence: Synthetic oligonucleotide"
  modified_base (7)..(7): a, c, t, g, unknown or other
  modified_base (10)..(17): a, c, t, g, unknown or other
cagctcnagnnnnnnnn

SEQ ID NO: 1020 - DNA, 18 bp, Artificial Sequence
  source: /note="Description of Artificial Sequence: Synthetic oligonucleotide"
  modified_base (8)..(8): a, c, t, g, unknown or other
  modified_base (12)..(18): a, c, t, g, unknown or other
ccagctcntggnnnnnnn

SEQ ID NO: 1021 - DNA, 17 bp, Artificial Sequence
  source: /note="Description of Artificial Sequence: Synthetic oligonucleotide"
  modified_base (10)..(17): a, c, t, g, unknown or other
cagctcatgnnnnnnnn

SEQ ID NO: 1022 - DNA, 17 bp, Artificial Sequence
  source: /note="Description of Artificial Sequence: Synthetic oligonucleotide"
  modified_base (10)..(17): a, c, t, g, unknown or other
cagctcgcgnnnnnnnn

SEQ ID NO: 1023 - DNA, 17 bp, Artificial Sequence
  source: /note="Description of Artificial Sequence: Synthetic oligonucleotide"
  modified_base (10)..(17): a, c, t, g, unknown or other
cagctccggnnnnnnnn

SEQ ID NO: 1024 - DNA, 18 bp, Artificial Sequence
  source: /note="Description of Artificial Sequence: Synthetic oligonucleotide"
  modified_base (8)..(18): a, c, t, g, unknown or other
ccagctcnnnnnnnnnnn

SEQ ID NO: 1025 - DNA, 17 bp, Artificial Sequence
  source: /note="Description of Artificial Sequence: Synthetic oligonucleotide"
  modified_base (11)..(17): a, c, t, g, unknown or other
cagctcgcgannnnnnn

SEQ ID NO: 1026 - DNA, 19 bp, Artificial Sequence
  source: /note="Description of Artificial Sequence: Synthetic oligonucleotide"
  modified_base (9)..(19): a, c, t, g, unknown or other
hgcagctcnnnnnnnnnnn

SEQ ID NO: 1027 - DNA, 17 bp, Artificial Sequence
  source: /note="Description of Artificial Sequence: Synthetic oligonucleotide"
  modified_base (7)..(7): a, c, t, g, unknown or other
  modified_base (10)..(17): a, c, t, g, unknown or other
cagctcngannnnnnnn

SEQ ID NO: 1028 - DNA, 17 bp, Artificial Sequence
  source: /note="Description of Artificial Sequence: Synthetic oligonucleotide"
  modified_base (7)..(8): a, c, t, g, unknown or other
  modified_base (11)..(17): a, c, t, g, unknown or other
cagctcnngannnnnnn

SEQ ID NO: 1029 - DNA, 19 bp, Artificial Sequence
  source: /note="Description of Artificial Sequence: Synthetic oligonucleotide"
  modified_base (9)..(19): a, c, t, g, unknown or other
ctcagctcnnnnnnnnnnn

SEQ ID NO: 1030 - DNA, 17 bp, Artificial Sequence
  source: /note="Description of Artificial Sequence: Synthetic oligonucleotide"
  modified_base (9)..(17): a, c, t, g, unknown or other
cagctcagnnnnnnnnn

SEQ ID NO: 1031 - DNA, 17 bp, Artificial Sequence
  source: /note="Description of Artificial Sequence: Synthetic oligonucleotide"
  modified_base (8)..(8): a, c, t, g, unknown or other
  modified_base (11)..(17): a, c, t, g, unknown or other
cagctctnagnnnnnnn

SEQ ID NO: 1032 - DNA, 20 bp, Artificial Sequence
  source: /note="Description of Artificial Sequence: Synthetic oligonucleotide"
  modified_base (10)..(20): a, c, t, g, unknown or other
ctrcagctcnnnnnnnnnnn

SEQ ID NO: 1033 - DNA, 17 bp, Artificial Sequence
  source: /note="Description of Artificial Sequence: Synthetic oligonucleotide"
  modified_base (8)..(9): a, c, t, g, unknown or other
  modified_base (12)..(17): a, c, t, g, unknown or other
cagctccnnggnnnnnn

SEQ ID NO: 1034 - DNA, 17 bp, Artificial Sequence
  source: /note="Description of Artificial Sequence: Synthetic oligonucleotide"
  modified_base (10)..(17): a, c, t, g, unknown or other
cagctcctcnnnnnnnn

SEQ ID NO: 1035 - DNA, 20 bp, Artificial Sequence
  source: /note="Description of Artificial Sequence: Synthetic oligonucleotide"
  modified_base (10)..(20): a, c, t, g, unknown or other
cttcagctcnnnnnnnnnnn

SEQ ID NO: 1036 - DNA, 17 bp, Artificial Sequence
  source: /note="Description of Artificial Sequence: Synthetic oligonucleotide"
  modified_base (10)..(17): a, c, t, g, unknown or other
cagctcwccnnnnnnnn

SEQ ID NO: 1037 - DNA, 18 bp, Artificial Sequence
  source: /note="Description of Artificial Sequence: Synthetic oligonucleotide"
  modified_base (8)..(18): a, c, t, g, unknown or other
ccagctcnnnnnnnnnnn

SEQ ID NO: 1038 - DNA, 18 bp, Artificial Sequence
  source: /note="Description of Artificial Sequence: Synthetic oligonucleotide"
  modified_base (8)..(18): a, c, t, g, unknown or other
ccagctcnnnnnnnnnnn

SEQ ID NO: 1039 - DNA, 20 bp, Artificial Sequence
  source: /note="Description of Artificial Sequence: Synthetic oligonucleotide"
  modified_base (10)..(20): a, c, t, g, unknown or other
ctccagctcnnnnnnnnnnn

SEQ ID NO: 1040 - DNA, 17 bp, Artificial Sequence
  source: /note="Description of Artificial Sequence: Synthetic oligonucleotide"
  modified_base (10)..(17): a, c, t, g, unknown or other
cagctccagnnnnnnnn

SEQ ID NO: 1041 - DNA, 21 bp, Artificial Sequence
  source: /note="Description of Artificial Sequence: Synthetic oligonucleotide"
  modified_base (3)..(3): a, c, t, g, unknown or other
  modified_base (11)..(21): a, c, t, g, unknown or other
ggnccagctcnnnnnnnnnnn

SEQ ID NO: 1042 - DNA, 17 bp, Artificial Sequence
  source: /note="Description of Artificial Sequence: Synthetic oligonucleotide"
  modified_base (11)..(17): a, c, t, g, unknown or other
cagctcctggnnnnnnn

SEQ ID NO: 1043 - DNA, 17 bp, Artificial Sequence
  source: /note="Description of Artificial Sequence: Synthetic oligonucleotide"
  modified_base (11)..(17): a, c, t, g, unknown or other
cagctccwggnnnnnnn

SEQ ID NO: 1044 - DNA, 22 bp, Artificial Sequence
  source: /note="Description of Artificial Sequence: Synthetic oligonucleotide"
  modified_base (12)..(22): a, c, t, g, unknown or other
gctagcagctcnnnnnnnnnnn

SEQ ID NO: 1045 - DNA, 17 bp, Artificial Sequence
  source: /note="Description of Artificial Sequence: Synthetic oligonucleotide"
  modified_base (10)..(17): a, c, t, g, unknown or other
cagctctggnnnnnnnn

SEQ ID NO: 1046 - DNA, 17 bp, Artificial Sequence
  source: /note="Description of Artificial Sequence: Synthetic oligonucleotide"
  modified_base (11)..(17): a, c, t, g, unknown or other
cagctccagannnnnnn

SEQ ID NO: 1047 - DNA, 17 bp, Artificial Sequence
  source: /note="Description of Artificial Sequence: Synthetic oligonucleotide"
  modified_base (10)..(17): a, c, t, g, unknown or other
cagctcgagnnnnnnnn

SEQ ID NO: 1048 - DNA, 17 bp, Artificial Sequence
  source: /note="Description of Artificial Sequence: Synthetic oligonucleotide"
  modified_base (12)..(17): a, c, t, g, unknown or other
cagctctcgagnnnnnn

SEQ ID NO: 1049 - DNA, 17 bp, Artificial Sequence
  source: /note="Description of Artificial Sequence: Synthetic oligonucleotide"
  modified_base (12)..(17): a, c, t, g, unknown or other
cagctccatggnnnnnn

SEQ ID NO: 1050 - DNA, 17 bp, Artificial Sequence
  source: /note="Description of Artificial Sequence: Synthetic oligonucleotide"
  modified_base (12)..(17): a, c, t, g, unknown or other
cagctcgatcgnnnnnn

SEQ ID NO: 1051 - DNA, 17 bp, Artificial Sequence
  source: /note="Description of Artificial Sequence: Synthetic oligonucleotide"
  modified_base (10)..(17): a, c, t, g, unknown or other
cagctctagnnnnnnnn

SEQ ID NO: 1052 - DNA, 17 bp, Artificial Sequence
  source: /note="Description of Artificial Sequence: Synthetic oligonucleotide"
  modified_base (10)..(17): a, c, t, g, unknown or other
cagctcgagnnnnnnnn

SEQ ID NO: 1053 - DNA, 17 bp, Artificial Sequence
  source: /note="Description of Artificial Sequence: Synthetic oligonucleotide"
  modified_base (12)..(17): a, c, t, g, unknown or other
cagctccatggnnnnnn

SEQ ID NO: 1054 - DNA, 17 bp, Artificial Sequence
  source: /note="Description of Artificial Sequence: Synthetic oligonucleotide"
  modified_base (12)..(17): a, c, t, g, unknown or other
cagctccwwggnnnnnn

SEQ ID NO: 1055 - DNA, 17 bp, Artificial Sequence
  source: /note="Description of Artificial Sequence: Synthetic oligonucleotide"
  modified_base (11)..(17): a, c, t, g, unknown or other
cagctctagannnnnnn

SEQ ID NO: 1056 - DNA, 18 bp, Artificial Sequence
  source: /note="Description of Artificial Sequence: Synthetic oligonucleotide"
  modified_base (11)..(18): a, c, t, g, unknown or other
gcagctcgtcnnnnnnnn

SEQ ID NO: 1057 - DNA, 17 bp, Artificial Sequence
  source: /note="Description of Artificial Sequence: Synthetic oligonucleotide"
  modified_base (10)..(17): a, c, t, g, unknown or other
cagctcttcnnnnnnnn

SEQ ID NO: 1058 - DNA, 17 bp, Artificial Sequence
  source: /note="Description of Artificial Sequence: Synthetic oligonucleotide"
  modified_base (12)..(17): a, c, t, g, unknown or other
cagctctcttcnnnnnn

SEQ ID NO: 1059 - DNA, 17 bp, Artificial Sequence
  source: /note="Description of Artificial Sequence: Synthetic oligonucleotide"
  modified_base (11)..(17): a, c, t, g, unknown or other
cagctcastgnnnnnnn

SEQ ID NO: 1060 - DNA, 17 bp, Artificial Sequence
  source: /note="Description of Artificial Sequence: Synthetic oligonucleotide"
  modified_base (11)..(17): a, c, t, g, unknown or other
cagctccagtnnnnnnn

SEQ ID NO: 1061 - DNA, 17 bp, Artificial Sequence
  source: /note="Description of Artificial Sequence: Synthetic oligonucleotide"
  modified_base (10)..(17): a, c, t, g, unknown or other
cagctccgcnnnnnnnn

SEQ ID NO: 1062 - DNA, 17 bp, Artificial Sequence
  source: /note="Description of Artificial Sequence: Synthetic oligonucleotide"
  modified_base (10)..(17): a, c, t, g, unknown or other
cagctcaccnnnnnnnn

SEQ ID NO: 1063 - DNA, 17 bp, Artificial Sequence
  source: /note="Description of Artificial Sequence: Synthetic oligonucleotide"
  modified_base (10)..(17): a, c, t, g, unknown or other
cagctcyycnnnnnnnn

SEQ ID NO: 1064 - DNA, 17 bp, Artificial Sequence
  source: /note="Description of Artificial Sequence: Synthetic oligonucleotide"
  modified_base (10)..(17): a, c, t, g, unknown or other
cagctcttcnnnnnnnn

SEQ ID NO: 1065 - DNA, 17 bp, Artificial Sequence
  source: /note="Description of Artificial Sequence: Synthetic oligonucleotide"
  modified_base (11)..(17): a, c, t, g, unknown or other
cagctccttcnnnnnnn

SEQ ID NO: 1066 - DNA, 17 bp, Artificial Sequence
  source: /note="Description of Artificial Sequence: Synthetic oligonucleotide"
  modified_base (10)..(17): a, c, t, g, unknown or other
cagctcttcnnnnnnnn

SEQ ID NO: 1067 - DNA, 17 bp, Artificial Sequence
  source: /note="Description of Artificial Sequence: Synthetic oligonucleotide"
  modified_base (10)..(17): a, c, t, g, unknown or other
cagctcaccnnnnnnnn

SEQ ID NO: 1068 - DNA, 17 bp, Artificial Sequence
  source: /note="Description of Artificial Sequence: Synthetic oligonucleotide"
  modified_base (10)..(17): a, c, t, g, unknown or other
cagctcttcnnnnnnnn

SEQ ID NO: 1069 - DNA, 17 bp, Artificial Sequence
  source: /note="Description of Artificial Sequence: Synthetic oligonucleotide"
  modified_base (10)..(17): a, c, t, g, unknown or other
cagctcctcnnnnnnnn

SEQ ID NO: 1070 - DNA, 17 bp, Artificial Sequence
  source: /note="Description of Artificial Sequence: Synthetic oligonucleotide"
  modified_base (10)..(17): a, c, t, g, unknown or other
gaagacgtcnnnnnnnn

SEQ ID NO: 1071 - DNA, 21 bp, Artificial Sequence
  source: /note="Description of Artificial Sequence: Synthetic oligonucleotide"
  modified_base (11)..(21): a, c, t, g, unknown or other
ccwggaagacnnnnnnnnnnn

SEQ ID NO: 1072 - DNA, 17 bp, Artificial Sequence
  source: /note="Description of Artificial Sequence: Synthetic oligonucleotide"
  modified_base (11)..(17): a, c, t, g, unknown or other
gaagaccwggnnnnnnn

SEQ ID NO: 1073 - DNA, 17 bp, Artificial Sequence
  source: /note="Description of Artificial Sequence: Synthetic oligonucleotide"
  modified_base (9)..(17): a, c, t, g, unknown or other
gaagactcnnnnnnnnn

SEQ ID NO: 1074 - DNA, 19 bp, Artificial Sequence
  source: /note="Description of Artificial Sequence: Synthetic oligonucleotide"
  modified_base (9)..(19): a, c, t, g, unknown or other
ctgaagacnnnnnnnnnnn

SEQ ID NO: 1075 - DNA, 20 bp, Artificial Sequence
  source: /note="Description of Artificial Sequence: Synthetic oligonucleotide"
  modified_base (10)..(20): a, c, t, g, unknown or other
gcggaagacnnnnnnnnnnn

SEQ ID NO: 1076 - DNA, 17 bp, Artificial Sequence
  source: /note="Description of Artificial Sequence: Synthetic oligonucleotide"
  modified_base (10)..(17): a, c, t, g, unknown or other
gaagaccgcnnnnnnnn

SEQ ID NO: 1077 - DNA, 17 bp, Artificial Sequence
  source: /note="Description of Artificial Sequence: Synthetic oligonucleotide"
  modified_base (11)..(17): a, c, t, g, unknown or other
gaagacrygtnnnnnnn

SEQ ID NO: 1078 - DNA, 19 bp, Artificial Sequence
  source: /note="Description of Artificial Sequence: Synthetic oligonucleotide"
  modified_base (9)..(19): a, c, t, g, unknown or other
ttgaagacnnnnnnnnnnn

SEQ ID NO: 1079 - DNA, 22 bp, Artificial Sequence
  source: /note="Description of Artificial Sequence: Synthetic oligonucleotide"
  modified_base (12)..(22): a, c, t, g, unknown or other
cggccgaagacnnnnnnnnnnn

SEQ ID NO: 1080 - DNA, 17 bp, Artificial Sequence
  source: /note="Description of Artificial Sequence: Synthetic oligonucleotide"
  modified_base (12)..(17): a, c, t, g, unknown or other
gaagacggccgnnnnnn

SEQ ID NO: 1081 - DNA, 22 bp, Artificial Sequence
  source: /note="Description of Artificial Sequence: Synthetic oligonucleotide"
  modified_base (12)..(22): a, c, t, g, unknown or other
cycgrgaagacnnnnnnnnnnn

SEQ ID NO: 1082 - DNA, 17 bp, Artificial Sequence
  source: /note="Description of Artificial Sequence: Synthetic oligonucleotide"
  modified_base (12)..(17): a, c, t, g, unknown or other
gaagacycgrgnnnnnn

SEQ ID NO: 1083 - DNA, 17 bp, Artificial Sequence
  source: /note="Description of Artificial Sequence: Synthetic oligonucleotide"
  modified_base (11)..(17): a, c, t, g, unknown or other
gaagaccggynnnnnnn

SEQ ID NO: 1084 - DNA, 22 bp, Artificial Sequence
  source: /note="Description of Artificial Sequence: Synthetic oligonucleotide"
  modified_base (12)..(22): a, c, t, g, unknown or other
ctcgagaagacnnnnnnnnnnn

SEQ ID NO: 1085 - DNA, 17 bp, Artificial Sequence
  source: /note="Description of Artificial Sequence: Synthetic oligonucleotide"
  modified_base (12)..(17): a, c, t, g, unknown or other
gaagactcgagnnnnnn

SEQ ID NO: 1086 - DNA, 20 bp, Artificial Sequence
  source: /note="Description of Artificial Sequence: Synthetic oligonucleotide"
  modified_base (10)..(20): a, c, t, g, unknown or other
cgcgaagacnnnnnnnnnnn

SEQ ID NO: 1087 - DNA, 17 bp, Artificial Sequence
  source: /note="Description of Artificial Sequence: Synthetic oligonucleotide"
  modified_base (10)..(17): a, c, t, g, unknown or other
gaagacgcgnnnnnnnn

SEQ ID NO: 1088 - DNA, 22 bp, Artificial Sequence
  source: /note="Description of Artificial Sequence: Synthetic oligonucleotide"
  modified_base (12)..(22): a, c, t, g, unknown or other
cycgrgaagacnnnnnnnnnnn

SEQ ID NO: 1089 - DNA, 17 bp, Artificial Sequence
  source: /note="Description of Artificial Sequence: Synthetic oligonucleotide"
  modified_base (12)..(17): a, c, t, g, unknown or other
gaagacycgrgnnnnnn

SEQ ID NO: 1090 - DNA, 20 bp, Artificial Sequence
  source: /note="Description of Artificial Sequence: Synthetic oligonucleotide"
  modified_base (10)..(20): a, c, t, g, unknown or other
ccggaagacnnnnnnnnnnn

SEQ ID NO: 1091 - DNA, 17 bp, Artificial Sequence
  source: /note="Description of Artificial Sequence: Synthetic oligonucleotide"
  modified_base (10)..(17): a, c, t, g, unknown or other
gaagaccggnnnnnnnn

SEQ ID NO: 1092 - DNA, 20 bp, Artificial Sequence
  source: /note="Description of Artificial Sequence: Synthetic oligonucleotide"
  modified_base (10)..(20): a, c, t, g, unknown or other
ctagaagacnnnnnnnnnnn

SEQ ID NO: 1093 - DNA, 17 bp, Artificial Sequence
  source: /note="Description of Artificial Sequence: Synthetic oligonucleotide"
  modified_base (10)..(17): a, c, t, g, unknown or other
gaagactagnnnnnnnn

SEQ ID NO: 1094 - DNA, 20 bp, Artificial Sequence
  source: /note="Description of Artificial Sequence: Synthetic oligonucleotide"
  modified_base (10)..(20): a, c, t, g, unknown or other
ttcgaagacnnnnnnnnnnn

SEQ ID NO: 1095 - DNA, 21 bp, Artificial Sequence
  source: /note="Description of Artificial Sequence: Synthetic oligonucleotide"
  modified_base (11)..(21): a, c, t, g, unknown or other
tccggaagacnnnnnnnnnnn

SEQ ID NO: 1096 - DNA, 17 bp, Artificial Sequence
  source: /note="Description of Artificial Sequence: Synthetic oligonucleotide"
  modified_base (11)..(17): a, c, t, g, unknown or other
gaagacgcgtnnnnnnn

SEQ ID NO: 1097 - DNA, 22 bp, Artificial Sequence
  source: /note="Description of Artificial Sequence: Synthetic oligonucleotide"
  modified_base (12)..(22): a, c, t, g, unknown or other
ccwwggaagacnnnnnnnnnnn

SEQ ID NO: 1098 - DNA, 17 bp, Artificial Sequence
  source: /note="Description of Artificial Sequence: Synthetic oligonucleotide"
  modified_base (12)..(17): a, c, t, g, unknown or other
gaagaccwwggnnnnnn

SEQ ID NO: 1099 - DNA, 21 bp, Artificial Sequence
  source: /note="Description of Artificial Sequence: Synthetic oligonucleotide"
  modified_base (11)..(21): a, c, t, g, unknown or other
ccwggaagacnnnnnnnnnnn

SEQ ID NO: 1100 - DNA, 17 bp, Artificial Sequence
  source: /note="Description of Artificial Sequence: Synthetic oligonucleotide"
  modified_base (11)..(17): a, c, t, g, unknown or other
gaagaccwggnnnnnnn

SEQ ID NO: 1101 - DNA, 19 bp, Artificial Sequence
  source: /note="Description of Artificial Sequence: Synthetic oligonucleotide"
  modified_base (9)..(19): a, c, t, g, unknown or other
tcgaagacnnnnnnnnnnn

SEQ ID NO: 1102 - DNA, 21 bp, Artificial Sequence
  source: /note="Description of Artificial Sequence: Synthetic oligonucleotide"
  modified_base (3)..(3): a, c, t, g, unknown or other
  modified_base (11)..(21): a, c, t, g, unknown or other
ctnagaagacnnnnnnnnnnn

SEQ ID NO: 1103 - DNA, 17 bp, Artificial Sequence
  source: /note="Description of Artificial Sequence: Synthetic oligonucleotide"
  modified_base (8)..(8): a, c, t, g, unknown or other
  modified_base (11)..(17): a, c, t, g, unknown or other
gaagactnagnnnnnnn

SEQ ID NO: 1104 - DNA, 19 bp, Artificial Sequence
  source: /note="Description of Artificial Sequence: Synthetic oligonucleotide"
  modified_base (9)..(19): a, c, t, g, unknown or other
ctgaagacnnnnnnnnnnn

SEQ ID NO: 1105 - DNA, 20 bp, Artificial Sequence
  source: /note="Description of Artificial Sequence: Synthetic oligonucleotide"
  modified_base (10)..(20): a, c, t, g, unknown or other
catgaagacnnnnnnnnnnn

SEQ ID NO: 1106 - DNA, 17 bp, Artificial Sequence
  source: /note="Description of Artificial Sequence: Synthetic oligonucleotide"
  modified_base (10)..(17): a, c, t, g, unknown or other
gaagacatgnnnnnnnn

SEQ ID NO: 1107 - DNA, 20 bp, Artificial Sequence
  source: /note="Description of Artificial Sequence: Synthetic oligonucleotide"
  modified_base (10)..(20): a, c, t, g, unknown or other
cgcgaagacnnnnnnnnnnn

SEQ ID NO: 1108 - DNA, 17 bp, Artificial Sequence
  source: /note="Description of Artificial Sequence: Synthetic oligonucleotide"
  modified_base (10)..(17): a, c, t, g, unknown or other
gaagacgcgnnnnnnnn

SEQ ID NO: 1109 - DNA, 20 bp, Artificial Sequence
  source: /note="Description of Artificial Sequence: Synthetic oligonucleotide"
  modified_base (10)..(20): a, c, t, g, unknown or other
ccggaagacnnnnnnnnnnn

SEQ ID NO: 1110 - DNA, 17 bp, Artificial Sequence
  source: /note="Description of Artificial Sequence: Synthetic oligonucleotide"
  modified_base (10)..(17): a, c, t, g, unknown or other
gaagaccggnnnnnnnn

SEQ ID NO: 1111 - DNA, 19 bp, Artificial Sequence
  source: /note="Description of Artificial Sequence: Synthetic oligonucleotide"
  modified_base (9)..(19): a, c, t, g, unknown or other
ctgaagacnnnnnnnnnnn

SEQ ID NO: 1112 - DNA, 17 bp, Artificial Sequence
  source: /note="Description of Artificial Sequence: Synthetic oligonucleotide"
  modified_base (7)..(9): a, c, t, g, unknown or other
  modified_base (13)..(17): a, c, t, g, unknown or other
gaagacnnngtcnnnnn

SEQ ID NO: 1113 - DNA, 21 bp, Artificial Sequence
  source: /note="Description of Artificial Sequence: Synthetic oligonucleotide"
  modified_base (11)..(21): a, c, t, g, unknown or other
tcgcgaagacnnnnnnnnnnn

SEQ ID NO: 1114 - DNA, 20 bp, Artificial Sequence
  source: /note="Description of Artificial Sequence: Synthetic oligonucleotide"
  modified_base (3)..(3): a, c, t, g, unknown or other
  modified_base (10)..(20): a, c, t, g, unknown or other
tcngaagacnnnnnnnnnnn

SEQ ID NO: 1115 - DNA, 17 bp, Artificial Sequence
  source: /note="Description of Artificial Sequence: Synthetic oligonucleotide"
  modified_base (7)..(7): a, c, t, g, unknown or other
  modified_base (10)..(17): a, c, t, g, unknown or other
gaagacngtnnnnnnnn

SEQ ID NO: 1116 - DNA, 21 bp, Artificial Sequence
  source: /note="Description of Artificial Sequence: Synthetic oligonucleotide"
  modified_base (3)..(4): a, c, t, g, unknown or other
  modified_base (11)..(21): a, c, t, g, unknown or other
tcnngaagacnnnnnnnnnnn

SEQ ID NO: 1117 - DNA, 21 bp, Artificial Sequence
  source: /note="Description of Artificial Sequence: Synthetic oligonucleotide"
  modified_base (3)..(3): a, c, t, g, unknown or other
  modified_base (11)..(21): a, c, t, g, unknown or other
ctnagaagacnnnnnnnnnnn

SEQ ID NO: 1118 - DNA, 17 bp, Artificial Sequence
  source: /note="Description of Artificial Sequence: Synthetic oligonucleotide"
  modified_base (8)..(8): a, c, t, g, unknown or other
  modified_base (11)..(17): a, c, t, g, unknown or other
gaagactnagnnnnnnn

SEQ ID NO: 1119 - DNA, 22 bp, Artificial Sequence
  source: /note="Description of Artificial Sequence: Synthetic oligonucleotide"
  modified_base (3)..(4): a, c, t, g, unknown or other
  modified_base (12)..(22): a, c, t, g, unknown or other
ccnnggaagacnnnnnnnnnnn

SEQ ID NO: 1120 - DNA, 17 bp, Artificial Sequence
  source: /note="Description of Artificial Sequence: Synthetic oligonucleotide"
  modified_base (8)..(9): a, c, t, g, unknown or other
  modified_base (12)..(17): a, c, t, g, unknown or other
gaagaccnnggnnnnnn

SEQ ID NO: 1121 - DNA, 17 bp, Artificial Sequence
  source: /note="Description of Artificial Sequence: Synthetic oligonucleotide"
  modified_base (9)..(17): a, c, t, g, unknown or other
gaagacgtnnnnnnnnn

SEQ ID NO: 1122 - DNA, 17 bp, Artificial Sequence
  source: /note="Description of Artificial Sequence: Synthetic oligonucleotide"
  modified_base (10)..(17): a, c, t, g, unknown or other
gaagacctcnnnnnnnn

SEQ ID NO: 1123 - DNA, 20 bp, Artificial Sequence
  source: /note="Description of Artificial Sequence: Synthetic oligonucleotide"
  modified_base (10)..(20): a, c, t, g, unknown or other
gaggaagacnnnnnnnnnnn

SEQ ID NO: 1124 - DNA, 19 bp, Artificial Sequence
  source: /note="Description of Artificial Sequence: Synthetic oligonucleotide"
  modified_base (9)..(19): a, c, t, g, unknown or other
ctgaagacnnnnnnnnnnn

SEQ ID NO: 1125 - DNA, 20 bp, Artificial Sequence
  source: /note="Description of Artificial Sequence: Synthetic oligonucleotide"
  modified_base (10)..(20): a, c, t, g, unknown or other
ggwgaagacnnnnnnnnnnn

SEQ ID NO: 1126 - DNA, 17 bp, Artificial Sequence
  source: /note="Description of Artificial Sequence: Synthetic oligonucleotide"
  modified_base (9)..(17): a, c, t, g, unknown or other
gaagactcnnnnnnnnn

SEQ ID NO: 1127 - DNA, 17 bp, Artificial Sequence
  source: /note="Description of Artificial Sequence: Synthetic oligonucleotide"
  modified_base (11)..(17): a, c, t, g, unknown or other
gaagacctggnnnnnnn

SEQ ID NO: 1128 - DNA, 21 bp, Artificial Sequence
  source: /note="Description of Artificial Sequence: Synthetic oligonucleotide"
  modified_base (11)..(21): a, c, t, g, unknown or other
ccaggaagacnnnnnnnnnnn

SEQ ID NO: 1129 - DNA, 21 bp, Artificial Sequence
  source: /note="Description of Artificial Sequence: Synthetic oligonucleotide"
  modified_base (11)..(21): a, c, t, g, unknown or other
ccwggaagacnnnnnnnnnnn

SEQ ID NO: 1130 - DNA, 17 bp, Artificial Sequence
  source: /note="Description of Artificial Sequence: Synthetic oligonucleotide"
  modified_base (11)..(17): a, c, t, g, unknown or other
gaagaccwggnnnnnnn

SEQ ID NO: 1131 - DNA, 20 bp, Artificial Sequence
  source: /note="Description of Artificial Sequence: Synthetic oligonucleotide"
  modified_base (10)..(20): a, c, t, g, unknown or other
ccagaagacnnnnnnnnnnn

SEQ ID NO: 1132 - DNA, 17 bp, Artificial Sequence
  source: /note="Description of Artificial Sequence: Synthetic oligonucleotide"
  modified_base (11)..(17): a, c, t, g, unknown or other
gaagaccggbnnnnnnn

SEQ ID NO: 1133 - DNA, 21 bp, Artificial Sequence
  source: /note="Description of Artificial Sequence: Synthetic oligonucleotide"
  modified_base (11)..(21): a, c, t, g, unknown or other
tctggaagacnnnnnnnnnnn

SEQ ID NO: 1134 - DNA, 17 bp, Artificial Sequence
  source: /note="Description of Artificial Sequence: Synthetic oligonucleotide"
  modified_base (11)..(17): a, c, t, g, unknown or other
gaagaccagannnnnnn

SEQ ID NO: 1135 - DNA, 22 bp, Artificial Sequence
  source: /note="Description of Artificial Sequence: Synthetic oligonucleotide"
  modified_base (12)..(22): a, c, t, g, unknown or other
ctcgagaagacnnnnnnnnnnn

SEQ ID NO: 1136 - DNA, 17 bp, Artificial Sequence
  source: /note="Description of Artificial Sequence: Synthetic oligonucleotide"
  modified_base (12)..(17): a, c, t, g, unknown or other
gaagactcgagnnnnnn

SEQ ID NO: 1137 - DNA, 17 bp, Artificial Sequence
  source: /note="Description of Artificial Sequence: Synthetic oligonucleotide"
  modified_base (11)..(17): a, c, t, g, unknown or other
gaagacatgynnnnnnn

SEQ ID NO: 1138 - DNA, 22 bp, Artificial Sequence
  source: /note="Description of Artificial Sequence: Synthetic oligonucleotide"
  modified_base (12)..(22): a, c, t, g, unknown or other
ccatggaagacnnnnnnnnnnn

SEQ ID NO: 1139 - DNA, 17 bp, Artificial Sequence
  source: /note="Description of Artificial Sequence: Synthetic oligonucleotide"
  modified_base (12)..(17): a, c, t, g, unknown or other
gaagaccatggnnnnnn

SEQ ID NO: 1140 - DNA, 22 bp, Artificial Sequence
  source: /note="Description of Artificial Sequence: Synthetic oligonucleotide"
  modified_base (12)..(22): a, c, t, g, unknown or other
cgatcgaagacnnnnnnnnnnn

SEQ ID NO: 1141 - DNA, 17 bp, Artificial Sequence
  source: /note="Description of Artificial Sequence: Synthetic oligonucleotide"
  modified_base (12)..(17): a, c, t, g, unknown or other
gaagacgatcgnnnnnn

SEQ ID NO: 1142 - DNA, 20 bp, Artificial Sequence
  source: /note="Description of Artificial Sequence: Synthetic oligonucleotide"
  modified_base (10)..(20): a, c, t, g, unknown or other
ctagaagacnnnnnnnnnnn

SEQ ID NO: 1143 - DNA, 17 bp, Artificial Sequence
  source: /note="Description of Artificial Sequence: Synthetic oligonucleotide"
  modified_base (10)..(17): a, c, t, g, unknown or other
gaagactagnnnnnnnn

SEQ ID NO: 1144 - DNA, 22 bp, Artificial Sequence
  source: /note="Description of Artificial Sequence: Synthetic oligonucleotide"
  modified_base (12)..(22): a, c, t, g, unknown or other
ccatggaagacnnnnnnnnnnn

SEQ ID NO: 1145 - DNA, 17 bp, Artificial Sequence
  source: /note="Description of Artificial Sequence: Synthetic oligonucleotide"
  modified_base (12)..(17): a, c, t, g, unknown or other
gaagaccatggnnnnnn

SEQ ID NO: 1146 - DNA, 22 bp, Artificial Sequence
  source: /note="Description of Artificial Sequence: Synthetic oligonucleotide"
  modified_base (12)..(22): a, c, t, g, unknown or other
ccwwggaagacnnnnnnnnnnn

SEQ ID NO: 1147 - DNA, 17 bp, Artificial Sequence
  source: /note="Description of Artificial Sequence: Synthetic oligonucleotide"
  modified_base (12)..(17): a, c, t, g, unknown or other
gaagaccwwggnnnnnn

SEQ ID NO: 1148 - DNA, 21 bp, Artificial Sequence
  source: /note="Description of Artificial Sequence: Synthetic oligonucleotide"
  modified_base (11)..(21): a, c, t, g, unknown or other
tctagaagacnnnnnnnnnnn

SEQ ID NO: 1149 - DNA, 17 bp, Artificial Sequence
  source: /note="Description of Artificial Sequence: Synthetic oligonucleotide"
  modified_base (7)..(10): a, c, t, g, unknown or other
  modified_base (14)..(17): a, c, t, g, unknown or other
gaagacnnnntgcnnnn

SEQ ID NO: 1150 - DNA, 22 bp, Artificial Sequence
  source: /note="Description of Artificial Sequence: Synthetic oligonucleotide"
  modified_base (12)..(22): a, c, t, g, unknown or other
gaagagaagacnnnnnnnnnnn

SEQ ID NO: 1151 - DNA, 17 bp, Artificial Sequence
  source: /note="Description of Artificial Sequence: Synthetic oligonucleotide"
  modified_base (12)..(17): a, c, t, g, unknown or other
gaagactcttcnnnnnn

SEQ ID NO: 1152 - DNA, 21 bp, Artificial Sequence
  source: /note="Description of Artificial Sequence: Synthetic oligonucleotide"
  modified_base (11)..(21): a, c, t, g, unknown or other
castgaagacnnnnnnnnnnn

SEQ ID NO: 1153 - DNA, 17 bp, Artificial Sequence
  source: /note="Description of Artificial Sequence: Synthetic oligonucleotide"
  modified_base (11)..(17): a, c, t, g, unknown or other
gaagacastgnnnnnnn

SEQ ID NO: 1154 - DNA, 17 bp, Artificial Sequence
  source: /note="Description of Artificial Sequence: Synthetic oligonucleotide"
  modified_base (7)..(7): a, c, t, g, unknown or other
  modified_base (11)..(17): a, c, t, g, unknown or other
gaagacnttcnnnnnnn

SEQ ID NO: 1155 - DNA, 21 bp, Artificial Sequence
  source: /note="Description of Artificial Sequence: Synthetic oligonucleotide"
  modified_base (11)..(21): a, c, t, g, unknown or other
actggaagacnnnnnnnnnnn

SEQ ID NO: 1156 - DNA, 17 bp, Artificial Sequence
  source: /note="Description of Artificial Sequence: Synthetic oligonucleotide"
  modified_base (10)..(17): a, c, t, g, unknown or other
gaagactggnnnnnnnn

SEQ ID NO: 1157 - DNA, 17 bp, Artificial Sequence
  source: /note="Description of Artificial Sequence: Synthetic oligonucleotide"
  modified_base (11)..(17): a, c, t, g, unknown or other
gaagaccagtnnnnnnn

SEQ ID NO: 1158 - DNA, 17 bp, Artificial Sequence
  source: /note="Description of Artificial Sequence: Synthetic oligonucleotide"
  modified_base (10)..(17): a, c, t, g, unknown or other
gaagacggcnnnnnnnn

SEQ ID NO: 1159 - DNA, 20 bp, Artificial Sequence
  source: /note="Description of Artificial Sequence: Synthetic oligonucleotide"
  modified_base (10)..(20): a, c, t, g, unknown or other
gcggaagacnnnnnnnnnnn

SEQ ID NO: 1160 - DNA, 17 bp, Artificial Sequence
  source: /note="Description of Artificial Sequence: Synthetic oligonucleotide"
  modified_base (10)..(17): a, c, t, g, unknown or other
gaagaccgcnnnnnnnn

SEQ ID NO: 1161 - DNA, 17 bp, Artificial Sequence
  source: /note="Description of Artificial Sequence: Synthetic oligonucleotide"
  modified_base (10)..(17): a, c, t, g, unknown or other
gaagacggcnnnnnnnn

SEQ ID NO: 1162 - DNA, 20 bp, Artificial Sequence
  source: /note="Description of Artificial Sequence: Synthetic oligonucleotide"
  modified_base (10)..(20): a, c, t, g, unknown or other
ggtgaagacnnnnnnnnnnn

SEQ ID NO: 1163 - DNA, 17 bp, Artificial Sequence
  source: /note="Description of Artificial Sequence: Synthetic oligonucleotide"
  modified_base (11)..(17): a, c, t, g, unknown or other
gaagaccttcnnnnnnn

SEQ ID NO: 1164 - DNA, 21 bp, Artificial Sequence
  source: /note="Description of Artificial Sequence: Synthetic oligonucleotide"
  modified_base (11)..(21): a, c, t, g, unknown or other
gaaggaagacnnnnnnnnnnn

SEQ ID NO: 1165 - DNA, 17 bp, Artificial Sequence
  source: /note="Description of Artificial Sequence: Synthetic oligonucleotide"
  modified_base (10)..(17): a, c, t, g, unknown or other
gaagacggcnnnnnnnn

SEQ ID NO: 1166 - DNA, 17 bp, Artificial Sequence
  source: /note="Description of Artificial Sequence: Synthetic oligonucleotide"
  modified_base (11)..(17): a, c, t, g, unknown or other
gaagactgggnnnnnnn

SEQ ID NO: 1167 - DNA, 17 bp, Artificial Sequence
  source: /note="Description of Artificial Sequence: Synthetic oligonucleotide"
  modified_base (11)..(17): a, c, t, g, unknown or other
gaagacctgcnnnnnnn

SEQ ID NO: 1168 - DNA, 20 bp, Artificial Sequence
  source: /note="Description of Artificial Sequence: Synthetic oligonucleotide"
  modified_base (10)..(20): a, c, t, g, unknown or other
ggtgaagacnnnnnnnnnnn

SEQ ID NO: 1169 - DNA, 17 bp, Artificial Sequence
  source: /note="Description of Artificial Sequence: Synthetic oligonucleotide"
  modified_base (9)..(17): a, c, t, g, unknown or other
gaagacgcnnnnnnnnn

SEQ ID NO: 1170 - DNA, 17 bp, Artificial Sequence
  source: /note="Description of Artificial Sequence: Synthetic oligonucleotide"
  modified_base (10)..(17): a, c, t, g, unknown or other
gaagacctcnnnnnnnn

SEQ ID NO: 1171 - DNA, 20 bp, Artificial Sequence
  source: /note="Description of Artificial Sequence: Synthetic oligonucleotide"
  modified_base (10)..(20): a, c, t, g, unknown or other
gaggaagacnnnnnnnnnnn

SEQ ID NO: 1172 - DNA, 17 bp, Artificial Sequence
  source: /note="Description of Artificial Sequence: Synthetic oligonucleotide"
  modified_base (9)..(17): a, c, t, g, unknown or other
gaagacgcnnnnnnnnn

SEQ ID NO: 1173 - DNA, 16 bp, Artificial Sequence
  source: /note="Description of Artificial Sequence: Synthetic oligonucleotide"
  modified_base (11)..(16): a, c, t, g, unknown or other
ccwggaagacnnnnnn

SEQ ID NO: 1174 - DNA, 12 bp, Artificial Sequence
  source: /note="Description of Artificial Sequence: Synthetic oligonucleotide"
  modified_base (9)..(12): a, c, t, g, unknown or other
gaagactcnnnn

SEQ ID NO: 1175 - DNA, 14 bp, Artificial Sequence
  source: /note="Description of Artificial Sequence: Synthetic oligonucleotide"
  modified_base (9)..(14): a, c, t, g, unknown or other
ctgaagacnnnnnn

SEQ ID NO: 1176 - DNA, 15 bp, Artificial Sequence
  source: /note="Description of Artificial Sequence: Synthetic oligonucleotide"
  modified_base (10)..(15): a, c, t, g, unknown or other
gcggaagacnnnnnn

SEQ ID NO: 1177 - DNA, 14 bp, Artificial Sequence
  source: /note="Description of Artificial Sequence: Synthetic oligonucleotide"
  modified_base (9)..(14): a, c, t, g, unknown or other
ttgaagacnnnnnn

SEQ ID NO: 1178 - DNA, 17 bp, Artificial Sequence
  source: /note="Description of Artificial Sequence: Synthetic oligonucleotide"
  modified_base (12)..(17): a, c, t, g, unknown or other
cggccgaagacnnnnnn

SEQ ID NO: 1179 - DNA, 17 bp, Artificial Sequence
  source: /note="Description of Artificial Sequence: Synthetic oligonucleotide"
  modified_base (12)..(17): a, c, t, g, unknown or other
cycgrgaagacnnnnnn

SEQ ID NO: 1180 - DNA, 17 bp, Artificial Sequence
  source: /note="Description of Artificial Sequence: Synthetic oligonucleotide"
  modified_base (12)..(17): a, c, t, g, unknown or other
ctcgagaagacnnnnnn

SEQ ID NO: 1181 - DNA, 15 bp, Artificial Sequence
  source: /note="Description of Artificial Sequence: Synthetic oligonucleotide"
  modified_base (10)..(15): a, c, t, g, unknown or other
cgcgaagacnnnnnn

SEQ ID NO: 1182 - DNA, 17 bp, Artificial Sequence
  source: /note="Description of Artificial Sequence: Synthetic oligonucleotide"
  modified_base (12)..(17): a, c, t, g, unknown or other
cycgrgaagacnnnnnn

SEQ ID NO: 1183 - DNA, 15 bp, Artificial Sequence
  source: /note="Description of Artificial Sequence: Synthetic oligonucleotide"
  modified_base (10)..(15): a, c, t, g, unknown or other
ccggaagacnnnnnn

SEQ ID NO: 1184 - DNA, 15 bp, Artificial Sequence
  source: /note="Description of Artificial Sequence: Synthetic oligonucleotide"
  modified_base (10)..(15): a, c, t, g, unknown or other
ctagaagacnnnnnn

SEQ ID NO: 1185 - DNA, 15 bp, Artificial Sequence
  source: /note="Description of Artificial Sequence: Synthetic oligonucleotide"
  modified_base (10)..(15): a, c, t, g, unknown or other
ttcgaagacnnnnnn

SEQ ID NO: 1186 - DNA, 16 bp, Artificial Sequence
  source: /note="Description of Artificial Sequence: Synthetic oligonucleotide"
  modified_base (11)..(16): a, c, t, g, unknown or other
tccggaagacnnnnnn

SEQ ID NO: 1187 - DNA, 17 bp, Artificial Sequence
  source: /note="Description of Artificial Sequence: Synthetic oligonucleotide"
  modified_base (12)..(17): a, c, t, g, unknown or other
ccwwggaagacnnnnnn

SEQ ID NO: 1188 - DNA, 16 bp, Artificial Sequence
  source: /note="Description of Artificial Sequence: Synthetic oligonucleotide"
  modified_base (11)..(16): a, c, t, g, unknown or other
ccwggaagacnnnnnn

SEQ ID NO: 1189 - DNA, 14 bp, Artificial Sequence
  source: /note="Description of Artificial Sequence: Synthetic oligonucleotide"
  modified_base (9)..(14): a, c, t, g, unknown or other
tcgaagacnnnnnn

SEQ ID NO: 1190 - DNA, 16 bp, Artificial Sequence
  source: /note="Description of Artificial Sequence: Synthetic oligonucleotide"
  modified_base (3)..(3): a, c, t, g, unknown or other
  modified_base (11)..(16): a, c, t, g, unknown or other
ctnagaagacnnnnnn

SEQ ID NO: 1191 - DNA, 14 bp, Artificial Sequence
  source: /note="Description of Artificial Sequence: Synthetic oligonucleotide"
  modified_base (9)..(14): a, c, t, g, unknown or other
ctgaagacnnnnnn

SEQ ID NO: 1192 - DNA, 15 bp, Artificial Sequence
  source: /note="Description of Artificial Sequence: Synthetic oligonucleotide"
  modified_base (10)..(15): a, c, t, g, unknown or other
catgaagacnnnnnn

SEQ ID NO: 1193 - DNA, 15 bp, Artificial Sequence
  source: /note="Description of Artificial Sequence: Synthetic oligonucleotide"
  modified_base (10)..(15): a, c, t, g, unknown or other
cgcgaagacnnnnnn

SEQ ID NO: 1194 - DNA, 15 bp, Artificial Sequence
  source: /note="Description of Artificial Sequence: Synthetic oligonucleotide"
  modified_base (10)..(15): a, c, t, g, unknown or other
ccggaagacnnnnnn

SEQ ID NO: 1195 - DNA, 14 bp, Artificial Sequence
  source: /note="Description of Artificial Sequence: Synthetic oligonucleotide"
  modified_base (9)..(14): a, c, t, g, unknown or other
ctgaagacnnnnnn

SEQ ID NO: 1196 - DNA, 16 bp, Artificial Sequence
  source: /note="Description of Artificial Sequence: Synthetic oligonucleotide"
  modified_base (11)..(16): a, c, t, g, unknown or other
tcgcgaagacnnnnnn

SEQ ID NO: 1197 - DNA, 15 bp, Artificial Sequence
  source: /note="Description of Artificial Sequence: Synthetic oligonucleotide"
  modified_base (3)..(3): a, c, t, g, unknown or other
  modified_base (10)..(15): a, c, t, g, unknown or other
tcngaagacnnnnnn

SEQ ID NO: 1198 - DNA, 16 bp, Artificial Sequence
  source: /note="Description of Artificial Sequence: Synthetic oligonucleotide"
  modified_base (3)..(4): a, c, t, g, unknown or other
  modified_base (11)..(16): a, c, t, g, unknown or other
tcnngaagacnnnnnn

SEQ ID NO: 1199 - DNA, 16 bp, Artificial Sequence
  source: /note="Description of Artificial Sequence: Synthetic oligonucleotide"
  modified_base (3)..(3): a, c, t, g, unknown or other
  modified_base (11)..(16): a, c, t, g, unknown or other
ctnagaagacnnnnnn

SEQ ID NO: 1200 - DNA, 17 bp, Artificial Sequence
  source: /note="Description of Artificial Sequence: Synthetic oligonucleotide"
  modified_base (3)..(4): a, c, t, g, unknown or other
  modified_base (12)..(17): a, c, t, g, unknown or other
ccnnggaagacnnnnnn

SEQ ID NO: 1201 - DNA, 12 bp, Artificial Sequence
  source: /note="Description of Artificial Sequence: Synthetic oligonucleotide"
  modified_base (9)..(12): a, c, t, g, unknown or other
gaagacgtnnnn

SEQ ID NO: 1202 - DNA, 15 bp, Artificial Sequence
  source: /note="Description of Artificial Sequence: Synthetic oligonucleotide"
  modified_base (10)..(15): a, c, t, g, unknown or other
gaggaagacnnnnnn

SEQ ID NO: 1203 - DNA, 14 bp, Artificial Sequence
  source: /note="Description of Artificial Sequence: Synthetic oligonucleotide"
  modified_base (9)..(14): a, c, t, g, unknown or other
ctgaagacnnnnnn

SEQ ID NO: 1204 - DNA, 15 bp, Artificial Sequence
  source: /note="Description of Artificial Sequence: Synthetic oligonucleotide"
  modified_base (10)..(15): a, c, t, g, unknown or other
ggwgaagacnnnnnn

SEQ ID NO: 1205 - DNA, 12 bp, Artificial Sequence
  source: /note="Description of Artificial Sequence: Synthetic oligonucleotide"
  modified_base (9)..(12): a, c, t, g, unknown or other
gaagactcnnnn

SEQ ID NO: 1206 - DNA, 16 bp, Artificial Sequence
  source: /note="Description of Artificial Sequence: Synthetic oligonucleotide"
  modified_base (11)..(16): a, c, t, g, unknown or other
ccaggaagacnnnnnn

SEQ ID NO: 1207 - DNA, 16 bp, Artificial Sequence
  source: /note="Description of Artificial Sequence: Synthetic oligonucleotide"
  modified_base (11)..(16): a, c, t, g, unknown or other
ccwggaagacnnnnnn

SEQ ID NO: 1208 - DNA, 15 bp, Artificial Sequence
  source: /note="Description of Artificial Sequence: Synthetic oligonucleotide"
  modified_base (10)..(15): a, c, t, g, unknown or other
ccagaagacnnnnnn

SEQ ID NO: 1209 - DNA, 16 bp, Artificial Sequence
  source: /note="Description of Artificial Sequence: Synthetic oligonucleotide"
  modified_base (11)..(16): a, c, t, g, unknown or other
tctggaagacnnnnnn

SEQ ID NO: 1210 - DNA, 17 bp, Artificial Sequence
  source: /note="Description of Artificial Sequence: Synthetic oligonucleotide"
  modified_base (12)..(17): a, c, t, g, unknown or other
ctcgagaagacnnnnnn

SEQ ID NO: 1211 - DNA, 17 bp, Artificial Sequence
  source: /note="Description of Artificial Sequence: Synthetic oligonucleotide"
  modified_base (12)..(17): a, c, t, g, unknown or other
ccatggaagacnnnnnn

SEQ ID NO: 1212 - DNA, 17 bp, Artificial Sequence
  source: /note="Description of Artificial Sequence: Synthetic oligonucleotide"
  modified_base (12)..(17): a, c, t, g, unknown or other
cgatcgaagacnnnnnn

SEQ ID NO: 1213 - DNA, 15 bp, Artificial Sequence
  source: /note="Description of Artificial Sequence: Synthetic oligonucleotide"
  modified_base (10)..(15): a, c, t, g, unknown or other
ctagaagacnnnnnn

SEQ ID NO: 1214 - DNA, 17 bp, Artificial Sequence
  source: /note="Description of Artificial Sequence: Synthetic oligonucleotide"
  modified_base (12)..(17): a, c, t, g, unknown or other
ccatggaagacnnnnnn

SEQ ID NO: 1215 - DNA, 17 bp, Artificial Sequence
  source: /note="Description of Artificial Sequence: Synthetic oligonucleotide"
  modified_base (12)..(17): a, c, t, g, unknown or other
ccwwggaagacnnnnnn

SEQ ID NO: 1216 - DNA, 16 bp, Artificial Sequence
  source: /note="Description of Artificial Sequence: Synthetic oligonucleotide"
  modified_base (11)..(16): a, c, t, g, unknown or other
tctagaagacnnnnnn

SEQ ID NO: 1217 - DNA, 17 bp, Artificial Sequence
  source: /note="Description of Artificial Sequence: Synthetic oligonucleotide"
  modified_base (12)..(17): a, c, t, g, unknown or other
gaagagaagacnnnnnn

SEQ ID NO: 1218 - DNA, 16 bp, Artificial Sequence
  source: /note="Description of Artificial Sequence: Synthetic oligonucleotide"
  modified_base (11)..(16): a, c, t, g, unknown or other
castgaagacnnnnnn

SEQ ID NO: 1219 - DNA, 16 bp, Artificial Sequence
  source: /note="Description of Artificial Sequence: Synthetic oligonucleotide"
  modified_base (11)..(16): a, c, t, g, unknown or other
actggaagacnnnnnn

SEQ ID NO: 1220 - DNA, 15 bp, Artificial Sequence
  source: /note="Description of Artificial Sequence: Synthetic oligonucleotide"
  modified_base (10)..(15): a, c, t, g, unknown or other
gcggaagacnnnnnn

SEQ ID NO: 1221 - DNA, 15 bp, Artificial Sequence
  source: /note="Description of Artificial Sequence: Synthetic oligonucleotide"
  modified_base (10)..(15): a, c, t, g, unknown or other
ggtgaagacnnnnnn

SEQ ID NO: 1222 - DNA, 16 bp, Artificial Sequence
  source: /note="Description of Artificial Sequence: Synthetic oligonucleotide"
  modified_base (11)..(16): a, c, t, g, unknown or other
gaaggaagacnnnnnn

SEQ ID NO: 1223 - DNA, 15 bp, Artificial Sequence
  source: /note="Description of Artificial Sequence: Synthetic oligonucleotide"
  modified_base (10)..(15): a, c, t, g, unknown or other
ggtgaagacnnnnnn

SEQ ID NO: 1224 - DNA, 12 bp, Artificial Sequence
  source: /note="Description of Artificial Sequence: Synthetic oligonucleotide"
  modified_base (9)..(12): a, c, t, g, unknown or other
gaagacgcnnnn

SEQ ID NO: 1225 - DNA, 15 bp, Artificial Sequence
  source: /note="Description of Artificial Sequence: Synthetic oligonucleotide"
  modified_base (10)..(15): a, c, t, g, unknown or other
gaggaagacnnnnnn

SEQ ID NO: 1226 - DNA, 12 bp, Artificial Sequence
  source: /note="Description of Artificial Sequence: Synthetic oligonucleotide"
  modified_base (9)..(12): a, c, t, g, unknown or other
gaagacgcnnnn

SEQ ID NO: 1227 - DNA, 12 bp, Artificial Sequence
  source: /note="Description of Artificial Sequence: Synthetic oligonucleotide"
  modified_base (9)..(12): a, c, t, g, unknown or other
gactcttcnnnn

SEQ ID NO: 1228 - DNA, 12 bp, Artificial Sequence
  source: /note="Description of Artificial Sequence: Synthetic oligonucleotide"
  modified_base (9)..(12): a, c, t, g, unknown or other
agctcttcnnnn

SEQ ID NO: 1229 - DNA, 12 bp, Artificial Sequence
  source: /note="Description of Artificial Sequence: Synthetic oligonucleotide"
  modified_base (9)..(12): a, c, t, g, unknown or other
agctcttcnnnn

SEQ ID NO: 1230 - DNA, 12 bp, Artificial Sequence
  source: /note="Description of Artificial Sequence: Synthetic oligonucleotide"
  modified_base (9)..(12): a, c, t, g, unknown or other
gtctcttcnnnn

SEQ ID NO: 1231 - DNA, 14 bp, Artificial Sequence
  source: /note="Description of Artificial Sequence: Synthetic oligonucleotide"
  modified_base (11)..(14): a, c, t, g, unknown or other
rgatctcttcnnnn

SEQ ID NO: 1232 - DNA, 13 bp, Artificial Sequence
  source: /note="Description of Artificial Sequence: Synthetic oligonucleotide"
  modified_base (10)..(13): a, c, t, g, unknown or other
gagctcttcnnnn

SEQ ID NO: 1233 - DNA, 13 bp, Artificial Sequence
  source: /note="Description of Artificial Sequence: Synthetic oligonucleotide"
  modified_base (10)..(13): a, c, t, g, unknown or other
gatctcttcnnnn

SEQ ID NO: 1234 - DNA, 13 bp, Artificial Sequence
  source: /note="Description of Artificial Sequence: Synthetic oligonucleotide"
  modified_base (10)..(13): a, c, t, g, unknown or other
grgctcttcnnnn

SEQ ID NO: 1235 - DNA, 14 bp, Artificial Sequence
  source: /note="Description of Artificial Sequence: Synthetic oligonucleotide"
  modified_base (11)..(14): a, c, t, g, unknown or other
ggwcctcttcnnnn

SEQ ID NO: 1236 - DNA, 14 bp, Artificial Sequence
  source: /note="Description of Artificial Sequence: Synthetic oligonucleotide"
  modified_base (11)..(14): a, c, t, g, unknown or other
agatctcttcnnnn

SEQ ID NO: 1237 - DNA, 13 bp, Artificial Sequence
  source: /note="Description of Artificial Sequence: Synthetic oligonucleotide"
  modified_base (10)..(13): a, c, t, g, unknown or other
sagctcttcnnnn

SEQ ID NO: 1238 - DNA, 13 bp, Artificial Sequence
  source: /note="Description of Artificial Sequence: Synthetic oligonucleotide"
  modified_base (10)..(13): a, c, t, g, unknown or other
gatctcttcnnnn

SEQ ID NO: 1239 - DNA, 14 bp, Artificial Sequence
  source: /note="Description of Artificial Sequence: Synthetic oligonucleotide"
  modified_base (3)..(3): a, c, t, g, unknown or other
  modified_base (11)..(14): a, c, t, g, unknown or other
ggncctcttcnnnn

SEQ ID NO: 1240 - DNA, 12 bp, Artificial Sequence
  source: /note="Description of Artificial Sequence: Synthetic oligonucleotide"
  modified_base (9)..(12): a, c, t, g, unknown or other
vgctcttcnnnn

SEQ ID NO: 1241 - DNA, 13 bp, Artificial Sequence
  source: /note="Description of Artificial Sequence: Synthetic oligonucleotide"
  modified_base (10)..(13): a, c, t, g, unknown or other
gtactcttcnnnn

SEQ ID NO: 1242 - DNA, 13 bp, Artificial Sequence
  source: /note="Description of Artificial Sequence: Synthetic oligonucleotide"
  modified_base (10)..(13): a, c, t, g, unknown or other
cgtctcttcnnnn

SEQ ID NO: 1243 - DNA, 11 bp, Artificial Sequence
  source: /note="Description of Artificial Sequence: Synthetic oligonucleotide"
  modified_base (8)..(11): a, c, t, g, unknown or other
cctcttcnnnn

SEQ ID NO: 1244 - DNA, 14 bp, Artificial Sequence
  source: /note="Description of Artificial Sequence: Synthetic oligonucleotide"
  modified_base (3)..(3): a, c, t, g, unknown or other
  modified_base (11)..(14): a, c, t, g, unknown or other
ggncctcttcnnnn

SEQ ID NO: 1245 - DNA, 12 bp, Artificial Sequence
  source: /note="Description of Artificial Sequence: Synthetic oligonucleotide"
  modified_base (9)..(12): a, c, t, g, unknown or other
gactcttcnnnn

SEQ ID NO: 1246 - DNA, 12 bp, Artificial Sequence
  source: /note="Description of Artificial Sequence: Synthetic oligonucleotide"
  modified_base (9)..(12): a, c, t, g, unknown or other
agctcttcnnnn

SEQ ID NO: 1247 - DNA, 12 bp, Artificial Sequence
  source: /note="Description of Artificial Sequence: Synthetic oligonucleotide"
  modified_base (9)..(12): a, c, t, g, unknown or other
rgctcttcnnnn

SEQ ID NO: 1248 - DNA, 15 bp, Artificial Sequence
  source: /note="Description of Artificial Sequence: Synthetic oligonucleotide"
  modified_base (12)..(15): a, c, t, g, unknown or other
gctagctcttcnnnn

SEQ ID NO: 1249 - DNA, 14 bp, Artificial Sequence
  source: /note="Description of Artificial Sequence: Synthetic oligonucleotide"
  modified_base (11)..(14): a, c, t, g, unknown or other
agtactcttcnnnn

SEQ ID NO: 1250 - DNA, 13 bp, Artificial Sequence
  source: /note="Description of Artificial Sequence: Synthetic oligonucleotide"
  modified_base (10)..(13): a, c, t, g, unknown or other
cagctcttcnnnn

SEQ ID NO: 1251 - DNA, 13 bp, Artificial Sequence
  source: /note="Description of Artificial Sequence: Synthetic oligonucleotide"
  modified_base (10)..(13): a, c, t, g, unknown or other
gagctcttcnnnn

SEQ ID NO: 1252 - DNA, 14 bp, Artificial Sequence
  source: /note="Description of Artificial Sequence: Synthetic oligonucleotide"
  modified_base (11)..(14): a, c, t, g, unknown or other
rgatctcttcnnnn

SEQ ID NO: 1253 - DNA, 13 bp, Artificial Sequence
  source: /note="Description of Artificial Sequence: Synthetic oligonucleotide"
  modified_base (10)..(13): a, c, t, g, unknown or other
ggcctcttcnnnn

SEQ ID NO: 1254 - DNA, 13 bp, Artificial Sequence
  source: /note="Description of Artificial Sequence: Synthetic oligonucleotide"
  modified_base (10)..(13): a, c, t, g, unknown or other
ccrctcttcnnnn

SEQ ID NO: 1255 - DNA, 14 bp, Artificial Sequence
  source: /note="Description of Artificial Sequence: Synthetic oligonucleotide"
  modified_base (11)..(14): a, c, t, g, unknown or other
aggcctcttcnnnn

SEQ ID NO: 1256 - DNA, 14 bp, Artificial Sequence
  source: /note="Description of Artificial Sequence: Synthetic oligonucleotide"
  modified_base (4)..(4): a, c, t, g, unknown or other
  modified_base (11)..(14): a, c, t, g, unknown or other
gaanctcttcnnnn

SEQ ID NO: 1257 - DNA, 11 bp, Artificial Sequence
  source: /note="Description of Artificial Sequence: Synthetic oligonucleotide"
  modified_base (8)..(11): a, c, t, g, unknown or other
gctcttcnnnn

SEQ ID NO: 1258 - DNA, 12 bp, Artificial Sequence
  source: /note="Description of Artificial Sequence: Synthetic oligonucleotide"
  modified_base (9)..(12): a, c, t, g, unknown or other
gactcttcnnnn

SEQ ID NO: 1259 - DNA, 11 bp, Artificial Sequence
  source: /note="Description of Artificial Sequence: Synthetic oligonucleotide"
  modified_base (8)..(11): a, c, t, g, unknown or other
cctcttcnnnn

SEQ ID NO: 1260 - DNA, 13 bp, Artificial Sequence
  source: /note="Description of Artificial Sequence: Synthetic oligonucleotide"
  modified_base (10)..(13): a, c, t, g, unknown or other
ggtctcttcnnnn

SEQ ID NO: 1261 - DNA, 15 bp, Artificial Sequence
  source: /note="Description of Artificial Sequence: Synthetic oligonucleotide"
  modified_base (11)..(15): a, c, t, g, unknown or other
ccwgggtctcnnnnn

SEQ ID NO: 1262 - DNA, 14 bp, Artificial Sequence
  source: /note="Description of Artificial Sequence: Synthetic oligonucleotide"
  modified_base (10)..(14): a, c, t, g, unknown or other
ccwggtctcnnnnn

SEQ ID NO: 1263 - DNA, 14 bp, Artificial Sequence
  source: /note="Description of Artificial Sequence: Synthetic oligonucleotide"
  modified_base (10)..(14): a, c, t, g, unknown or other
gcgggtctcnnnnn

SEQ ID NO: 1264 - DNA, 13 bp, Artificial Sequence
  source: /note="Description of Artificial Sequence: Synthetic oligonucleotide"
  modified_base (9)..(13): a, c, t, g, unknown or other
gcggtctcnnnnn

SEQ ID NO: 1265 - DNA, 18 bp, Artificial Sequence
  source: /note="Description of Artificial Sequence: Synthetic oligonucleotide"
  modified_base (4)..(7): a, c, t, g, unknown or other
  modified_base (14)..(18): a, c, t, g, unknown or other
gacnnnnggtctcnnnnn

SEQ ID NO: 1266 - DNA, 16 bp, Artificial Sequence
  source: /note="Description of Artificial Sequence: Synthetic oligonucleotide"
  modified_base (12)..(16): a, c, t, g, unknown or other
cggccggtctcnnnnn

SEQ ID NO: 1267 - DNA, 16 bp, Artificial Sequence
  source: /note="Description of Artificial Sequence: Synthetic oligonucleotide"
  modified_base (12)..(16): a, c, t, g, unknown or other
cycgrggtctcnnnnn

SEQ ID NO: 1268 - DNA, 15 bp, Artificial Sequence
  source: /note="Description of Artificial Sequence: Synthetic oligonucleotide"
  modified_base (11)..(15): a, c, t, g, unknown or other
cycgggtctcnnnnn

SEQ ID NO: 1269 - DNA, 14 bp, Artificial Sequence
  source: /note="Description of Artificial Sequence: Synthetic oligonucleotide"
  modified_base (10)..(14): a, c, t, g, unknown or other
ccwggtctcnnnnn

SEQ ID NO: 1270 - DNA, 14 bp, Artificial Sequence
  source: /note="Description of Artificial Sequence: Synthetic oligonucleotide"
  modified_base (10)..(14): a, c, t, g, unknown or other
rccggtctcnnnnn

SEQ ID NO: 1271 - DNA, 16 bp, Artificial Sequence
  source: /note="Description of Artificial Sequence: Synthetic oligonucleotide"
  modified_base (12)..(16): a, c, t, g, unknown or other
ctcgaggtctcnnnnn

SEQ ID NO: 1272 - DNA, 14 bp, Artificial Sequence
  source: /note="Description of Artificial Sequence: Synthetic oligonucleotide"
  modified_base (10)..(14): a, c, t, g, unknown or other
cgcggtctcnnnnn

SEQ ID NO: 1273 - DNA, 14 bp, Artificial Sequence
  source: /note="Description of Artificial Sequence: Synthetic oligonucleotide"
  modified_base (10)..(14): a, c, t, g, unknown or other
ccwggtctcnnnnn

SEQ ID NO: 1274 - DNA, 16 bp, Artificial Sequence
  source: /note="Description of Artificial Sequence: Synthetic oligonucleotide"
  modified_base (12)..(16): a, c, t, g, unknown or other
cycgrggtctcnnnnn

SEQ ID NO: 1275 - DNA, 15 bp, Artificial Sequence
  source: /note="Description of Artificial Sequence: Synthetic oligonucleotide"
  modified_base (11)..(15): a, c, t, g, unknown or other
cycgggtctcnnnnn

SEQ ID NO: 1276 - DNA, 14 bp, Artificial Sequence
  source: /note="Description of Artificial Sequence: Synthetic oligonucleotide"
  modified_base (10)..(14): a, c, t, g, unknown or other
ccgggtctcnnnnn

SEQ ID NO: 1277 - DNA, 13 bp, Artificial Sequence
  source: /note="Description of Artificial Sequence: Synthetic oligonucleotide"
  modified_base (9)..(13): a, c, t, g, unknown or other
ccggtctcnnnnn

SEQ ID NO: 1278 - DNA, 14 bp, Artificial Sequence
  source: /note="Description of Artificial Sequence: Synthetic oligonucleotide"
  modified_base (10)..(14): a, c, t, g, unknown or other
ctaggtctcnnnnn

SEQ ID NO: 1279 - DNA, 15 bp, Artificial Sequence
  source: /note="Description of Artificial Sequence: Synthetic oligonucleotide"
  modified_base (11)..(15): a, c, t, g, unknown or other
ccssggtctcnnnnn

SEQ ID NO: 1280 - DNA, 15 bp, Artificial Sequence
  source: /note="Description of Artificial Sequence: Synthetic oligonucleotide"
  modified_base (11)..(15): a, c, t, g, unknown or other
cccgggtctcnnnnn

SEQ ID NO: 1281 - DNA, 16 bp, Artificial Sequence
  source: /note="Description of Artificial Sequence: Synthetic oligonucleotide"
  modified_base (12)..(16): a, c, t, g, unknown or other
ccwwgggtctcnnnnn

SEQ ID NO: 1282 - DNA, 15 bp, Artificial Sequence
  source: /note="Description of Artificial Sequence: Synthetic oligonucleotide"
  modified_base (11)..(15): a, c, t, g, unknown or other
ccwwggtctcnnnnn

SEQ ID NO: 1283 - DNA, 15 bp, Artificial Sequence
  source: /note="Description of Artificial Sequence: Synthetic oligonucleotide"
  modified_base (11)..(15): a, c, t, g, unknown or other
ccwgggtctcnnnnn

SEQ ID NO: 1284 - DNA, 14 bp, Artificial Sequence
  source: /note="Description of Artificial Sequence: Synthetic oligonucleotide"
  modified_base (10)..(14): a, c, t, g, unknown or other
ccwggtctcnnnnn

SEQ ID NO: 1285 - DNA, 14 bp, Artificial Sequence
  source: /note="Description of Artificial Sequence: Synthetic oligonucleotide"
  modified_base (10)..(14): a, c, t, g, unknown or other
ccwggtctcnnnnn

SEQ ID NO: 1286 - DNA, 15 bp, Artificial Sequence
  source: /note="Description of Artificial Sequence: Synthetic oligonucleotide"
  modified_base (3)..(3): a, c, t, g, unknown or other
  modified_base (11)..(15): a, c, t, g, unknown or other
ctnaggtctcnnnnn

SEQ ID NO: 1287 - DNA, 14 bp, Artificial Sequence
  source: /note="Description of Artificial Sequence: Synthetic oligonucleotide"
  modified_base (3)..(3): a, c, t, g, unknown or other
  modified_base (10)..(14): a, c, t, g, unknown or other
ccnggtctcnnnnn

SEQ ID NO: 1288 - DNA, 15 bp, Artificial Sequence
  source: /note="Description of Artificial Sequence: Synthetic oligonucleotide"
  modified_base (11)..(15): a, c, t, g, unknown or other
ccgcggtctcnnnnn

SEQ ID NO: 1289 - DNA, 20 bp, Artificial Sequence
  source: /note="Description of Artificial Sequence: Synthetic oligonucleotide"
  modified_base (4)..(8): a, c, t, g, unknown or other
  modified_base (16)..(20): a, c, t, g, unknown or other
cctnnnnnaggtctcnnnnn

SEQ ID NO: 1290 - DNA, 13 bp, Artificial Sequence
  source: /note="Description of Artificial Sequence: Synthetic oligonucleotide"
  modified_base (9)..(13): a, c, t, g, unknown or other
ccggtctcnnnnn

SEQ ID NO: 1291 - DNA, 14 bp, Artificial Sequence
  source: /note="Description of Artificial Sequence: Synthetic oligonucleotide"
  modified_base (10)..(14): a, c, t, g, unknown or other
catggtctcnnnnn

SEQ ID NO: 1292 - DNA, 14 bp, Artificial Sequence
  source: /note="Description of Artificial Sequence: Synthetic oligonucleotide"
  modified_base (10)..(14): a, c, t, g, unknown or other
cgcggtctcnnnnn

SEQ ID NO: 1293 - DNA, 14 bp, Artificial Sequence
  source: /note="Description of Artificial Sequence: Synthetic oligonucleotide"
  modified_base (10)..(14): a, c, t, g, unknown or other
ccgggtctcnnnnn

SEQ ID NO: 1294 - DNA, 13 bp, Artificial Sequence
  source: /note="Description of Artificial Sequence: Synthetic oligonucleotide"
  modified_base (9)..(13): a, c, t, g, unknown or other
ccggtctcnnnnn

SEQ ID NO: 1295 - DNA, 13 bp, Artificial Sequence
  source: /note="Description of Artificial Sequence: Synthetic oligonucleotide"
  modified_base (9)..(13): a, c, t, g, unknown or other
ccggtctcnnnnn

SEQ ID NO: 1296 - DNA, 13 bp, Artificial Sequence
  source: /note="Description of Artificial Sequence: Synthetic oligonucleotide"
  modified_base (9)..(13): a, c, t, g, unknown or other
ctggtctcnnnnn

SEQ ID NO: 1297 - DNA, 16 bp, Artificial Sequence
  source: /note="Description of Artificial Sequence: Synthetic oligonucleotide"
  modified_base (4)..(5): a, c, t, g, unknown or other
  modified_base (12)..(16): a, c, t, g, unknown or other
gacnnggtctcnnnnn

SEQ ID NO: 1298 - DNA, 13 bp, Artificial Sequence
  source: /note="Description of Artificial Sequence: Synthetic oligonucleotide"
  modified_base (9)..(13): a, c, t, g, unknown or other
acggtctcnnnnn

SEQ ID NO: 1299 - DNA, 15 bp, Artificial Sequence
  source: /note="Description of Artificial Sequence: Synthetic oligonucleotide"
  modified_base (3)..(3): a, c, t, g, unknown or other
  modified_base (11)..(15): a, c, t, g, unknown or other
ctnaggtctcnnnnn

SEQ ID NO: 1300 - DNA, 16 bp, Artificial Sequence
  source: /note="Description of Artificial Sequence: Synthetic oligonucleotide"
  modified_base (3)..(4): a, c, t, g, unknown or other
  modified_base (12)..(16): a, c, t, g, unknown or other
ccnngggtctcnnnnn

SEQ ID NO: 1301 - DNA, 15 bp, Artificial Sequence
  source: /note="Description of Artificial Sequence: Synthetic oligonucleotide"
  modified_base (3)..(4): a, c, t, g, unknown or other
  modified_base (11)..(15): a, c, t, g, unknown or other
ccnnggtctcnnnnn

SEQ ID NO: 1302 - DNA, 14 bp, Artificial Sequence
  source: /note="Description of Artificial Sequence: Synthetic oligonucleotide"
  modified_base (10)..(14): a, c, t, g, unknown or other
gaaggtctcnnnnn

SEQ ID NO: 1303 - DNA, 14 bp, Artificial Sequence
  source: /note="Description of Artificial Sequence: Synthetic oligonucleotide"
  modified_base (10)..(14): a, c, t, g, unknown or other
gagggtctcnnnnn

SEQ ID NO: 1304 - DNA, 13 bp, Artificial Sequence
  source: /note="Description of Artificial Sequence: Synthetic oligonucleotide"
  modified_base (9)..(13): a, c, t, g, unknown or other
gaggtctcnnnnn

SEQ ID NO: 1305 - DNA, 11 bp, Artificial Sequence
  source: /note="Description of Artificial Sequence: Synthetic oligonucleotide"
  modified_base (8)..(11): a, c, t, g, unknown or other
ggtctccnnnn

SEQ ID NO: 1306 - DNA, 15 bp, Artificial Sequence
  source: /note="Description of Artificial Sequence: Synthetic oligonucleotide"
  modified_base (11)..(15): a, c, t, g, unknown or other
ccagggtctcnnnnn

SEQ ID NO: 1307 - DNA, 14 bp, Artificial Sequence
  source: /note="Description of Artificial Sequence: Synthetic oligonucleotide"
  modified_base (10)..(14): a, c, t, g, unknown or other
ccaggtctcnnnnn

SEQ ID NO: 1308 - DNA, 15 bp, Artificial Sequence
  source: /note="Description of Artificial Sequence: Synthetic oligonucleotide"
  modified_base (11)..(15): a, c, t, g, unknown or other
ccwgggtctcnnnnn

SEQ ID NO: 1309 - DNA, 14 bp, Artificial Sequence
  source: /note="Description of Artificial Sequence: Synthetic oligonucleotide"
  modified_base (10)..(14): a, c, t, g, unknown or other
ccwggtctcnnnnn

SEQ ID NO: 1310 - DNA, 14 bp, Artificial Sequence
  source: /note="Description of Artificial Sequence: Synthetic oligonucleotide"
  modified_base (10)..(14): a, c, t, g, unknown or other
tctggtctcnnnnn

SEQ ID NO: 1311 - DNA, 14 bp, Artificial Sequence
  source: /note="Description of Artificial Sequence: Synthetic oligonucleotide"
  modified_base (10)..(14): a, c, t, g, unknown or other
vccggtctcnnnnn

SEQ ID NO: 1312 - DNA, 15 bp, Artificial Sequence
  source: /note="Description of Artificial Sequence: Synthetic oligonucleotide"
  modified_base (11)..(15): a, c, t, g, unknown or other
rccgggtctcnnnnn

SEQ ID NO: 1313 - DNA, 15 bp, Artificial Sequence
  source: /note="Description of Artificial Sequence: Synthetic oligonucleotide"
  modified_base (11)..(15): a, c, t, g, unknown or other
tctgggtctcnnnnn

SEQ ID NO: 1314 - DNA, 14 bp, Artificial Sequence
  source: /note="Description of Artificial Sequence: Synthetic oligonucleotide"
  modified_base (10)..(14): a, c, t, g, unknown or other
tctggtctcnnnnn

SEQ ID NO: 1315 - DNA, 16 bp, Artificial Sequence
  source: /note="Description of Artificial Sequence: Synthetic oligonucleotide"
  modified_base (12)..(16): a, c, t, g, unknown or other
ctcgaggtctcnnnnn

SEQ ID NO: 1316 - DNA, 16 bp, Artificial Sequence
  source: /note="Description of Artificial Sequence: Synthetic oligonucleotide"
  modified_base (12)..(16): a, c, t, g, unknown or other
ccatgggtctcnnnnn

SEQ ID NO: 1317 - DNA, 15 bp, Artificial Sequence
  source: /note="Description of Artificial Sequence: Synthetic oligonucleotide"
  modified_base (11)..(15): a, c, t, g, unknown or other
ccatggtctcnnnnn

SEQ ID NO: 1318 - DNA, 16 bp, Artificial Sequence
  source: /note="Description of Artificial Sequence: Synthetic oligonucleotide"
  modified_base (12)..(16): a, c, t, g, unknown or other
cgatcggtctcnnnnn

SEQ ID NO: 1319 - DNA, 14 bp, Artificial Sequence
  source: /note="Description of Artificial Sequence: Synthetic oligonucleotide"
  modified_base (10)..(14): a, c, t, g, unknown or other
ctaggtctcnnnnn

SEQ ID NO: 1320 - DNA, 16 bp, Artificial Sequence
  source: /note="Description of Artificial Sequence: Synthetic oligonucleotide"
  modified_base (12)..(16): a, c, t, g, unknown or other
ccatgggtctcnnnnn

SEQ ID NO: 1321 - DNA, 15 bp, Artificial Sequence
  source: /note="Description of Artificial Sequence: Synthetic oligonucleotide"
  modified_base (11)..(15): a, c, t, g, unknown or other
ccatggtctcnnnnn

SEQ ID NO: 1322 - DNA, 16 bp, Artificial Sequence
  source: /note="Description of Artificial Sequence: Synthetic oligonucleotide"
  modified_base (12)..(16): a, c, t, g, unknown or other
ccwwgggtctcnnnnn

SEQ ID NO: 1323 - DNA, 15 bp, Artificial Sequence
  source: /note="Description of Artificial Sequence: Synthetic oligonucleotide"
  modified_base (11)..(15): a, c, t, g, unknown or other
ccwwggtctcnnnnn

SEQ ID NO: 1324 - DNA, 17 bp, Artificial Sequence
  source: /note="Description of Artificial Sequence: Synthetic oligonucleotide"
  modified_base (4)..(6): a, c, t, g, unknown or other
  modified_base (13)..(17): a, c, t, g, unknown or other
gcannnggtctcnnnnn

SEQ ID NO: 1325 - DNA, 16 bp, Artificial Sequence
  source: /note="Description of Artificial Sequence: Synthetic oligonucleotide"
  modified_base (12)..(16): a, c, t, g, unknown or other
gaagaggtctcnnnnn

SEQ ID NO: 1326 - DNA, 15 bp, Artificial Sequence
  source: /note="Description of Artificial Sequence: Synthetic oligonucleotide"
  modified_base (11)..(15): a, c, t, g, unknown or other
castggtctcnnnnn

SEQ ID NO: 1327 - DNA, 15 bp, Artificial Sequence
  source: /note="Description of Artificial Sequence: Synthetic oligonucleotide"
  modified_base (11)..(15): a, c, t, g, unknown or other
actgggtctcnnnnn

SEQ ID NO: 1328 - DNA, 14 bp, Artificial Sequence
  source: /note="Description of Artificial Sequence: Synthetic oligonucleotide"
  modified_base (10)..(14): a, c, t, g, unknown or other
actggtctcnnnnn

SEQ ID NO: 1329 - DNA, 15 bp, Artificial Sequence
  source: /note="Description of Artificial Sequence: Synthetic oligonucleotide"
  modified_base (11)..(15): a, c, t, g, unknown or other
cacgggtctcnnnnn

SEQ ID NO: 1330 - DNA, 14 bp, Artificial Sequence
  source: /note="Description of Artificial Sequence: Synthetic oligonucleotide"
  modified_base (10)..(14): a, c, t, g, unknown or other
ccsggtctcnnnnn

SEQ ID NO: 1331 - DNA, 15 bp, Artificial Sequence
  source: /note="Description of Artificial Sequence: Synthetic oligonucleotide"
  modified_base (11)..(15): a, c, t, g, unknown or other
actgggtctcnnnnn

SEQ ID NO: 1332 - DNA, 14 bp, Artificial Sequence
  source: /note="Description of Artificial Sequence: Synthetic oligonucleotide"
  modified_base (10)..(14): a, c, t, g, unknown or other
gcgggtctcnnnnn

SEQ ID NO: 1333 - DNA, 13 bp, Artificial Sequence
  source: /note="Description of Artificial Sequence: Synthetic oligonucleotide"
  modified_base (9)..(13): a, c, t, g, unknown or other
gcggtctcnnnnn

SEQ ID NO: 1334 - DNA, 11 bp, Artificial Sequence
  source: /note="Description of Artificial Sequence: Synthetic oligonucleotide"
  modified_base (8)..(11): a, c, t, g, unknown or other
ggtctccnnnn

SEQ ID NO: 1335 - DNA, 15 bp, Artificial Sequence
  source: /note="Description of Artificial Sequence: Synthetic oligonucleotide"
  modified_base (11)..(15): a, c, t, g, unknown or other
gaagggtctcnnnnn

SEQ ID NO: 1336 - DNA, 14 bp, Artificial Sequence
  source: /note="Description of Artificial Sequence: Synthetic oligonucleotide"
  modified_base (10)..(14): a, c, t, g, unknown or other
gaaggtctcnnnnn

SEQ ID NO: 1337 - DNA, 14 bp, Artificial Sequence
  source: /note="Description of Artificial Sequence: Synthetic oligonucleotide"
  modified_base (10)..(14): a, c, t, g, unknown or other
gcaggtctcnnnnn

SEQ ID NO: 1338 - DNA, 14 bp, Artificial Sequence
  source: /note="Description of Artificial Sequence: Synthetic oligonucleotide"
  modified_base (10)..(14): a, c, t, g, unknown or other
gagggtctcnnnnn

SEQ ID NO: 1339 - DNA, 13 bp, Artificial Sequence
  source: /note="Description of Artificial Sequence: Synthetic oligonucleotide"
  modified_base (9)..(13): a, c, t, g, unknown or other
gaggtctcnnnnn

SEQ ID NO: 1340 - DNA, 13 bp, Artificial Sequence
  source: /note="Description of Artificial Sequence: Synthetic oligonucleotide"
  modified_base (9)..(13): a, c, t, g, unknown or other
gacgtctcnnnnn

SEQ ID NO: 1341 - DNA, 14 bp, Artificial Sequence
  source: /note="Description of Artificial Sequence: Synthetic oligonucleotide"
  modified_base (10)..(14): a, c, t, g, unknown or other
acrcgtctcnnnnn

SEQ ID NO: 1342 - DNA, 18 bp, Artificial Sequence
  source: /note="Description of Artificial Sequence: Synthetic oligonucleotide"
  modified_base (4)..(7): a, c, t, g, unknown or other
  modified_base (14)..(18): a, c, t, g, unknown or other
gacnnnncgtctcnnnnn

SEQ ID NO: 1343 - DNA, 15 bp, Artificial Sequence
  source: /note="Description of Artificial Sequence: Synthetic oligonucleotide"
  modified_base (11)..(15): a, c, t, g, unknown or other
cggccgtctcnnnnn

SEQ ID NO: 1344 - DNA, 14 bp, Artificial Sequence
  source: /note="Description of Artificial Sequence: Synthetic oligonucleotide"
  modified_base (10)..(14): a, c, t, g, unknown or other
gatcgtctcnnnnn

SEQ ID NO: 1345 - DNA, 15 bp, Artificial Sequence
  source: /note="Description of Artificial Sequence: Synthetic oligonucleotide"
  modified_base (11)..(15): a, c, t, g, unknown or other
ggwccgtctcnnnnn

SEQ ID NO: 1346 - DNA, 13 bp, Artificial Sequence
  source: /note="Description of Artificial Sequence: Synthetic oligonucleotide"
  modified_base (9)..(13): a, c, t, g, unknown or other
cgcgtctcnnnnn

SEQ ID NO: 1347 - DNA, 15 bp, Artificial Sequence
  source: /note="Description of Artificial Sequence: Synthetic oligonucleotide"
  modified_base (11)..(15): a, c, t, g, unknown or other
cgtacgtctcnnnnn

SEQ ID NO: 1348 - DNA, 14 bp, Artificial Sequence
  source: /note="Description of Artificial Sequence: Synthetic oligonucleotide"
  modified_base (10)..(14): a, c, t, g, unknown or other
gatcgtctcnnnnn

SEQ ID NO: 1349 - DNA, 14 bp, Artificial Sequence
  source: /note="Description of Artificial Sequence: Synthetic oligonucleotide"
  modified_base (10)..(14): a, c, t, g, unknown or other
acgcgtctcnnnnn

SEQ ID NO: 1350 - DNA, 15 bp, Artificial Sequence
  source: /note="Description of Artificial Sequence: Synthetic oligonucleotide"
  modified_base (3)..(3): a, c, t, g, unknown or other
  modified_base (11)..(15): a, c, t, g, unknown or other
ggnccgtctcnnnnn

SEQ ID NO: 1351 - DNA, 13 bp, Artificial Sequence
  source: /note="Description of Artificial Sequence: Synthetic oligonucleotide"
  modified_base (9)..(13): a, c, t, g, unknown or other
rgcgtctcnnnnn

SEQ ID NO: 1352 - DNA, 14 bp, Artificial Sequence
  source: /note="Description of Artificial Sequence: Synthetic oligonucleotide"
  modified_base (10)..(14): a, c, t, g, unknown or other
gtacgtctcnnnnn

SEQ ID NO: 1353 - DNA, 13 bp, Artificial Sequence
  source: /note="Description of Artificial Sequence: Synthetic oligonucleotide"
  modified_base (9)..(13): a, c, t, g, unknown or other
cgcgtctcnnnnn

SEQ ID NO: 1354 - DNA, 16 bp, Artificial Sequence
  source: /note="Description of Artificial Sequence: Synthetic oligonucleotide"
  modified_base (4)..(5): a, c, t, g, unknown or other
  modified_base (12)..(16): a, c, t, g, unknown or other
gacnncgtctcnnnnn

SEQ ID NO: 1355 - DNA, 13 bp, Artificial Sequence
  source: /note="Description of Artificial Sequence: Synthetic oligonucleotide"
  modified_base (9)..(13): a, c, t, g, unknown or other
accgtctcnnnnn

SEQ ID NO: 1356 - DNA, 14 bp, Artificial Sequence
  source: /note="Description of Artificial Sequence: Synthetic oligonucleotide"
  modified_base (10)..(14): a, c, t, g, unknown or other
cgwcgtctcnnnnn

SEQ ID NO: 1357 - DNA, 12 bp, Artificial Sequence
  source: /note="Description of Artificial Sequence: Synthetic oligonucleotide"
  modified_base (8)..(12): a, c, t, g, unknown or other
acgtctcnnnnn

SEQ ID NO: 1358 - DNA, 11 bp, Artificial Sequence
  source: /note="Description of Artificial Sequence: Synthetic oligonucleotide"
  modified_base (8)..(11): a, c, t, g, unknown or other
cgtctccnnnn

SEQ ID NO: 1359 - DNA, 15 bp, Artificial Sequence
  source: /note="Description of Artificial Sequence: Synthetic oligonucleotide"
  modified_base (3)..(3): a, c, t, g, unknown or other
  modified_base (11)..(15): a, c, t, g, unknown or other
ggnccgtctcnnnnn

SEQ ID NO: 1360 - DNA, 16 bp, Artificial Sequence
  source: /note="Description of Artificial Sequence: Synthetic oligonucleotide"
  modified_base (12)..(16): a, c, t, g, unknown or other
gctagcgtctcnnnnn

SEQ ID NO: 1361 - DNA, 15 bp, Artificial Sequence
  source: /note="Description of Artificial Sequence: Synthetic oligonucleotide"
  modified_base (11)..(15): a, c, t, g, unknown or other
cgatcgtctcnnnnn

SEQ ID NO: 1362 - DNA, 17 bp, Artificial Sequence
  source: /note="Description of Artificial Sequence: Synthetic oligonucleotide"
  modified_base (4)..(6): a, c, t, g, unknown or other
  modified_base (13)..(17): a, c, t, g, unknown or other
gcannncgtctcnnnnn

SEQ ID NO: 1363 - DNA, 13 bp, Artificial Sequence
  source: /note="Description of Artificial Sequence: Synthetic oligonucleotide"
  modified_base (9)..(13): a, c, t, g, unknown or other
gccgtctcnnnnn

SEQ ID NO: 1364 - DNA, 13 bp, Artificial Sequence
  source: /note="Description of Artificial Sequence: Synthetic oligonucleotide"
  modified_base (9)..(13): a, c, t, g, unknown or other
gccgtctcnnnnn

SEQ ID NO: 1365 - DNA, 12 bp, Artificial Sequence
  source: /note="Description of Artificial Sequence: Synthetic oligonucleotide"
  modified_base (8)..(12): a, c, t, g, unknown or other
gcgtctcnnnnn

SEQ ID NO: 1366 - DNA, 11 bp, Artificial Sequence
  source: /note="Description of Artificial Sequence: Synthetic oligonucleotide"
  modified_base (8)..(11): a, c, t, g, unknown or other
cgtctccnnnn

SEQ ID NO: 1367 - DNA, 13 bp, Artificial Sequence
  source: /note="Description of Artificial Sequence: Synthetic oligonucleotide"
  modified_base (9)..(13): a, c, t, g, unknown or other
gccgtctcnnnnn

SEQ ID NO: 1368 - DNA, 12 bp, Artificial Sequence
  source: /note="Description of Artificial Sequence: Synthetic oligonucleotide"
  modified_base (8)..(12): a, c, t, g, unknown or other
gcgtctcnnnnn

SEQ ID NO: 1369 - DNA, 12 bp, Artificial Sequence
  source: /note="Description of Artificial Sequence: Synthetic oligonucleotide"
  modified_base (8)..(12): a, c, t, g, unknown or other
gcgtctcnnnnn

SEQ ID NO: 1370 - DNA, 24 bp, Artificial Sequence
  source: /note="Description of Artificial Sequence: Synthetic oligonucleotide"
  modified_base (11)..(24): a, c, t, g, unknown or other
ccwggcgatgnnnnnnnnnnnnnn

SEQ ID NO: 1371 - DNA, 23 bp, Artificial Sequence
  source: /note="Description of Artificial Sequence: Synthetic oligonucleotide"
  modified_base (10)..(23): a, c, t, g, unknown or other
gcggcgatgnnnnnnnnnnnnnn

SEQ ID NO: 1372 - DNA, 22 bp, Artificial Sequence
  source: /note="Description of Artificial Sequence: Synthetic oligonucleotide"
  modified_base (9)..(22): a, c, t, g, unknown or other
ccgcgatgnnnnnnnnnnnnnn

SEQ ID NO: 1373 - DNA, 25 bp, Artificial Sequence
  source: /note="Description of Artificial Sequence: Synthetic oligonucleotide"
  modified_base (12)..(25): a, c, t, g, unknown or other
cggccgcgatgnnnnnnnnnnnnnn

SEQ ID NO: 1374 - DNA, 25 bp, Artificial Sequence
  source: /note="Description of Artificial Sequence: Synthetic oligonucleotide"
  modified_base (12)..(25): a, c, t, g, unknown or other
cycgrgcgatgnnnnnnnnnnnnnn

SEQ ID NO: 1375 - DNA, 26 bp, Artificial Sequence
  source: /note="Description of Artificial Sequence: Synthetic oligonucleotide"
  modified_base (13)..(26): a, c, t, g, unknown or other
gcgatcgcgatgnnnnnnnnnnnnnn

SEQ ID NO: 1376 - DNA, 24 bp, Artificial Sequence
  source: /note="Description of Artificial Sequence: Synthetic oligonucleotide"
  modified_base (11)..(24): a, c, t, g, unknown or other
rccggcgatgnnnnnnnnnnnnnn

SEQ ID NO: 1377 - DNA, 20 bp, Artificial Sequence
  source: /note="Description of Artificial Sequence: Synthetic oligonucleotide"
  modified_base (10)..(20): a, c, t, g, unknown or other
gcgatgatcnnnnnnnnnnn

SEQ ID NO: 1378 - DNA, 23 bp, Artificial Sequence
  source: /note="Description of Artificial Sequence: Synthetic oligonucleotide"
  modified_base (10)..(23): a, c, t, g, unknown or other
gcwgcgatgnnnnnnnnnnnnnn

SEQ ID NO: 1379 - DNA, 23 bp, Artificial Sequence
  source: /note="Description of Artificial Sequence: Synthetic oligonucleotide"
  modified_base (10)..(23): a, c, t, g, unknown or other
gctgcgatgnnnnnnnnnnnnnn

SEQ ID NO: 1380 - DNA, 23 bp, Artificial Sequence
  source: /note="Description of Artificial Sequence: Synthetic oligonucleotide"
  modified_base (10)..(23): a, c, t, g, unknown or other
gcagcgatgnnnnnnnnnnnnnn

SEQ ID NO: 1381 - DNA, 20 bp, Artificial Sequence
  source: /note="Description of Artificial Sequence: Synthetic oligonucleotide"
  modified_base (11)..(20): a, c, t, g, unknown or other
gcgatggwccnnnnnnnnnn

SEQ ID NO: 1382 - DNA, 25 bp, Artificial Sequence
  source: /note="Description of Artificial Sequence: Synthetic oligonucleotide"
  modified_base (12)..(25): a, c, t, g, unknown or other
ctcgagcgatgnnnnnnnnnnnnnn

SEQ ID NO: 1383 - DNA, 23 bp, Artificial Sequence
  source: /note="Description of Artificial Sequence: Synthetic oligonucleotide"
  modified_base (10)..(23): a, c, t, g, unknown or other
cgcgcgatgnnnnnnnnnnnnnn

SEQ ID NO: 1384 - DNA, 21 bp, Artificial Sequence
  source: /note="Description of Artificial Sequence: Synthetic oligonucleotide"
  modified_base (8)..(21): a, c, t, g, unknown or other
cgcgatgnnnnnnnnnnnnnn

SEQ ID NO: 1385 - DNA, 20 bp, Artificial Sequence
  source: /note="Description of Artificial Sequence: Synthetic oligonucleotide"
  modified_base (10)..(20): a, c, t, g, unknown or other
gcgatgcatnnnnnnnnnnn

SEQ ID NO: 1386 - DNA, 29 bp, Artificial Sequence
  source: /note="Description of Artificial Sequence: Synthetic oligonucleotide"
  modified_base (4)..(8): a, c, t, g, unknown or other
  modified_base (16)..(29): a, c, t, g, unknown or other
gccnnnnnggcgatgnnnnnnnnnnnnnn

SEQ ID NO: 1387 - DNA, 25 bp, Artificial Sequence
  source: /note="Description of Artificial Sequence: Synthetic oligonucleotide"
  modified_base (12)..(25): a, c, t, g, unknown or other
cycgrgcgatgnnnnnnnnnnnnnn

SEQ ID NO: 1388 - DNA, 20 bp, Artificial Sequence
  source: /note="Description of Artificial Sequence: Synthetic oligonucleotide"
  modified_base (10)..(20): a, c, t, g, unknown or other
gcgatgatcnnnnnnnnnnn

SEQ ID NO: 1389 - DNA, 25 bp, Artificial Sequence
  source: /note="Description of Artificial Sequence: Synthetic oligonucleotide"
  modified_base (4)..(5): a, c, t, g, unknown or other
  modified_base (13)..(25): a, c, t, g, unknown or other
ccanngcgatggnnnnnnnnnnnnn

SEQ ID NO: 1390 - DNA, 23 bp, Artificial Sequence
  source: /note="Description of Artificial Sequence: Synthetic oligonucleotide"
  modified_base (10)..(23): a, c, t, g, unknown or other
ccggcgatgnnnnnnnnnnnnnn

SEQ ID NO: 1391 - DNA, 23 bp, Artificial Sequence
  source: /note="Description of Artificial Sequence: Synthetic oligonucleotide"
  modified_base (10)..(23): a, c, t, g, unknown or other
ctagcgatgnnnnnnnnnnnnnn

SEQ ID NO: 1392 - DNA, 24 bp, Artificial Sequence
  source: /note="Description of Artificial Sequence: Synthetic oligonucleotide"
  modified_base (3)..(4): a, c, t, g, unknown or other
  modified_base (11)..(24): a, c, t, g, unknown or other
gcnngcgatgnnnnnnnnnnnnnn

SEQ ID NO: 1393 - DNA, 25 bp, Artificial Sequence
  source: /note="Description of Artificial Sequence: Synthetic oligonucleotide"
  modified_base (12)..(25): a, c, t, g, unknown or other
ygccggcgatgnnnnnnnnnnnnnn

SEQ ID NO: 1394 - DNA, 23 bp, Artificial Sequence
  source: /note="Description of Artificial Sequence: Synthetic oligonucleotide"
  modified_base (3)..(3): a, c, t, g, unknown or other
  modified_base (10)..(23): a, c, t, g, unknown or other
gcngcgatgnnnnnnnnnnnnnn

SEQ ID NO: 1395 - DNA, 25 bp, Artificial Sequence
  source: /note="Description of Artificial Sequence: Synthetic oligonucleotide"
  modified_base (12)..(25): a, c, t, g, unknown or other
ccwwggcgatgnnnnnnnnnnnnnn

SEQ ID NO: 1396 - DNA, 24 bp, Artificial Sequence
  source: /note="Description of Artificial Sequence: Synthetic oligonucleotide"
  modified_base (11)..(24): a, c, t, g, unknown or other
ccwggcgatgnnnnnnnnnnnnnn

SEQ ID NO: 1397 - DNA, 20 bp, Artificial Sequence
  source: /note="Description of Artificial Sequence: Synthetic oligonucleotide"
  modified_base (8)..(8): a, c, t, g, unknown or other
  modified_base (11)..(20): a, c, t, g, unknown or other
gcgatggnccnnnnnnnnnn

SEQ ID NO: 1398 - DNA, 24 bp, Artificial Sequence
  source: /note="Description of Artificial Sequence: Synthetic oligonucleotide"
  modified_base (11)..(24): a, c, t, g, unknown or other
gccggcgatgnnnnnnnnnnnnnn

SEQ ID NO: 1399 - DNA, 21 bp, Artificial Sequence
  source: /note="Description of Artificial Sequence: Synthetic oligonucleotide"
  modified_base (8)..(21): a, c, t, g, unknown or other
rgcgatgnnnnnnnnnnnnnn

SEQ ID NO: 1400 - DNA, 20 bp, Artificial Sequence
  source: /note="Description of Artificial Sequence: Synthetic oligonucleotide"
  modified_base (9)..(20): a, c, t, g, unknown or other
gcgatgcannnnnnnnnnnn

SEQ ID NO: 1401 - DNA, 20 bp, Artificial Sequence
  source: /note="Description of Artificial Sequence: Synthetic oligonucleotide"
  modified_base (10)..(20): a, c, t, g, unknown or other
gcgatgtacnnnnnnnnnnn

SEQ ID NO: 1402 - DNA, 24 bp, Artificial Sequence
  source: /note="Description of Artificial Sequence: Synthetic oligonucleotide"
  modified_base (3)..(3): a, c, t, g, unknown or other
  modified_base (11)..(24): a, c, t, g, unknown or other
ctnagcgatgnnnnnnnnnnnnnn

SEQ ID NO: 1403 - DNA, 24 bp, Artificial Sequence
  source: /note="Description of Artificial Sequence: Synthetic oligonucleotide"
  modified_base (4)..(4): a, c, t, g, unknown or other
  modified_base (12)..(24): a, c, t, g, unknown or other
ccangcgatggnnnnnnnnnnnnn

SEQ ID NO: 1404 - DNA, 23 bp, Artificial Sequence
  source: /note="Description of Artificial Sequence: Synthetic oligonucleotide"
  modified_base (10)..(23): a, c, t, g, unknown or other
catgcgatgnnnnnnnnnnnnnn

SEQ ID NO: 1405 - DNA, 23 bp, Artificial Sequence
  source: /note="Description of Artificial Sequence: Synthetic oligonucleotide"
  modified_base (10)..(23): a, c, t, g, unknown or other
cgcgcgatgnnnnnnnnnnnnnn

SEQ ID NO: 1406 - DNA, 21 bp, Artificial Sequence
  source: /note="Description of Artificial Sequence: Synthetic oligonucleotide"
  modified_base (8)..(21): a, c, t, g, unknown or other
cgcgatgnnnnnnnnnnnnnn

SEQ ID NO: 1407 - DNA, 23 bp, Artificial Sequence
  source: /note="Description of Artificial Sequence: Synthetic oligonucleotide"
  modified_base (10)..(23): a, c, t, g, unknown or other
ccggcgatgnnnnnnnnnnnnnn

SEQ ID NO: 1408 - DNA, 22 bp, Artificial Sequence
  source: /note="Description of Artificial Sequence: Synthetic oligonucleotide"
  modified_base (9)..(22): a, c, t, g, unknown or other
gcgcgatgnnnnnnnnnnnnnn

SEQ ID NO: 1409 - DNA, 22 bp, Artificial Sequence
  source: /note="Description of Artificial Sequence: Synthetic oligonucleotide"
  modified_base (9)..(22): a, c, t, g, unknown or other
tcgcgatgnnnnnnnnnnnnnn

SEQ ID NO: 1410 - DNA, 24 bp, Artificial Sequence
  source: /note="Description of Artificial Sequence: Synthetic oligonucleotide"
  modified_base (11)..(24): a, c, t, g, unknown or other
mgcwgcgatgnnnnnnnnnnnnnn

SEQ ID NO: 1411 - DNA, 22 bp, Artificial Sequence
  source: /note="Description of Artificial Sequence: Synthetic oligonucleotide"
  modified_base (9)..(22): a, c, t, g, unknown or other
tcgcgatgnnnnnnnnnnnnnn

SEQ ID NO: 1412 - DNA, 24 bp, Artificial Sequence
  source: /note="Description of Artificial Sequence: Synthetic oligonucleotide"
  modified_base (3)..(3): a, c, t, g, unknown or other
  modified_base (11)..(24): a, c, t, g, unknown or other
ctnagcgatgnnnnnnnnnnnnnn

SEQ ID NO: 1413 - DNA, 25 bp, Artificial Sequence
  source: /note="Description of Artificial Sequence: Synthetic oligonucleotide"
  modified_base (3)..(4): a, c, t, g, unknown or other
  modified_base (12)..(25): a, c, t, g, unknown or other
ccnnggcgatgnnnnnnnnnnnnnn

SEQ ID NO: 1414 - DNA, 23 bp, Artificial Sequence
  source: /note="Description of Artificial Sequence: Synthetic oligonucleotide"
  modified_base (10)..(23): a, c, t, g, unknown or other
gaggcgatgnnnnnnnnnnnnnn

SEQ ID NO: 1415 - DNA, 20 bp, Artificial Sequence
  source: /note="Description of Artificial Sequence: Synthetic oligonucleotide"
  modified_base (8)..(8): a, c, t, g, unknown or other
  modified_base (11)..(20): a, c, t, g, unknown or other
gcgatggnccnnnnnnnnnn

SEQ ID NO: 1416 - DNA, 24 bp, Artificial Sequence
  source: /note="Description of Artificial Sequence: Synthetic oligonucleotide"
  modified_base (11)..(24): a, c, t, g, unknown or other
ccaggcgatgnnnnnnnnnnnnnn

SEQ ID NO: 1417 - DNA, 24 bp, Artificial Sequence
  source: /note="Description of Artificial Sequence: Synthetic oligonucleotide"
  modified_base (11)..(24): a, c, t, g, unknown or other
ccwggcgatgnnnnnnnnnnnnnn

SEQ ID NO: 1418 - DNA, 24 bp, Artificial Sequence
  source: /note="Description of Artificial Sequence: Synthetic oligonucleotide"
  modified_base (11)..(24): a, c, t, g, unknown or other
gctagcgatgnnnnnnnnnnnnnn

SEQ ID NO: 1419 - DNA, 20 bp, Artificial Sequence
  source: /note="Description of Artificial Sequence: Synthetic oligonucleotide"
  modified_base (12)..(20): a, c, t, g, unknown or other
gcgatgctagcnnnnnnnnn

SEQ ID NO: 1420 - DNA, 24 bp, Artificial Sequence
  source: /note="Description of Artificial Sequence: Synthetic oligonucleotide"
  modified_base (11)..(24): a, c, t, g, unknown or other
gcgcgcgatgnnnnnnnnnnnnnn

SEQ ID NO: 1421 - DNA, 24 bp, Artificial Sequence
  source: /note="Description of Artificial Sequence: Synthetic oligonucleotide"
  modified_base (11)..(24): a, c, t, g, unknown or other
vccggcgatgnnnnnnnnnnnnnn

SEQ ID NO: 1422 - DNA, 24 bp, Artificial Sequence
  source: /note="Description of Artificial Sequence: Synthetic oligonucleotide"
  modified_base (11)..(24): a, c, t, g, unknown or other
tctggcgatgnnnnnnnnnnnnnn

SEQ ID NO: 1423 - DNA, 25 bp, Artificial Sequence
  source: /note="Description of Artificial Sequence: Synthetic oligonucleotide"
  modified_base (12)..(25): a, c, t, g, unknown or other
ctcgagcgatgnnnnnnnnnnnnnn

SEQ ID NO: 1424 - DNA, 24 bp, Artificial Sequence
  source: /note="Description of Artificial Sequence: Synthetic oligonucleotide"
  modified_base (11)..(24): a, c, t, g, unknown or other
rcatgcgatgnnnnnnnnnnnnnn

SEQ ID NO: 1425 - DNA, 25 bp, Artificial Sequence
  source: /note="Description of Artificial Sequence: Synthetic oligonucleotide"
  modified_base (12)..(25): a, c, t, g, unknown or other
ccatggcgatgnnnnnnnnnnnnnn

SEQ ID NO: 1426 - DNA, 25 bp, Artificial Sequence
  source: /note="Description of Artificial Sequence: Synthetic oligonucleotide"
  modified_base (12)..(25): a, c, t, g, unknown or other
cgatcgcgatgnnnnnnnnnnnnnn

SEQ ID NO: 1427 - DNA, 23 bp, Artificial Sequence
  source: /note="Description of Artificial Sequence: Synthetic oligonucleotide"
  modified_base (10)..(23): a, c, t, g, unknown or other
ctagcgatgnnnnnnnnnnnnnn

SEQ ID NO: 1428 - DNA, 25 bp, Artificial Sequence
  source: /note="Description of Artificial Sequence: Synthetic oligonucleotide"
  modified_base (12)..(25): a, c, t, g, unknown or other
ccatggcgatgnnnnnnnnnnnnnn

SEQ ID NO: 1429 - DNA, 25 bp, Artificial Sequence
  source: /note="Description of Artificial Sequence: Synthetic oligonucleotide"
  modified_base (12)..(25): a, c, t, g, unknown or other
ccwwggcgatgnnnnnnnnnnnnnn

SEQ ID NO: 1430 - DNA, 23 bp, Artificial Sequence
  source: /note="Description of Artificial Sequence: Synthetic oligonucleotide"
  modified_base (11)..(23): a, c, t, g, unknown or other
gacgcgatgcnnnnnnnnnnnnn

SEQ ID NO: 1431 - DNA, 25 bp, Artificial Sequence
  source: /note="Description of Artificial Sequence: Synthetic oligonucleotide"
  modified_base (12)..(25): a, c, t, g, unknown or other
gaagagcgatgnnnnnnnnnnnnnn

SEQ ID NO: 1432 - DNA, 24 bp, Artificial Sequence
  source: /note="Description of Artificial Sequence: Synthetic oligonucleotide"
  modified_base (11)..(24): a, c, t, g, unknown or other
castgcgatgnnnnnnnnnnnnnn

SEQ ID NO: 1433 - DNA, 28 bp, Artificial Sequence
  source: /note="Description of Artificial Sequence: Synthetic oligonucleotide"
  modified_base (4)..(8): a, c, t, g, unknown or other
  modified_base (16)..(28): a, c, t, g, unknown or other
ccannnnngcgatggnnnnnnnnnnnnn

SEQ ID NO: 1434 - DNA, 24 bp, Artificial Sequence
  source: /note="Description of Artificial Sequence: Synthetic oligonucleotide"
  modified_base (11)..(24): a, c, t, g, unknown or other
gcgcgcgatgnnnnnnnnnnnnnn

SEQ ID NO: 1435 - DNA, 24 bp, Artificial Sequence
  source: /note="Description of Artificial Sequence: Synthetic oligonucleotide"
  modified_base (11)..(24): a, c, t, g, unknown or other
actggcgatgnnnnnnnnnnnnnn

SEQ ID NO: 1436 - DNA, 20 bp, Artificial Sequence
  source: /note="Description of Artificial Sequence: Synthetic oligonucleotide"
  modified_base (8)..(20): a, c, t, g, unknown or other
gcgatggnnnnnnnnnnnnn

SEQ ID NO: 1437 - DNA, 20 bp, Artificial Sequence
  source: /note="Description of Artificial Sequence: Synthetic oligonucleotide"
  modified_base (8)..(20): a, c, t, g, unknown or other
gcgatgcnnnnnnnnnnnnn

SEQ ID NO: 1438 - DNA, 23 bp, Artificial Sequence
  source: /note="Description of Artificial Sequence: Synthetic oligonucleotide"
  modified_base (10)..(23): a, c, t, g, unknown or other
gcggcgatgnnnnnnnnnnnnnn

SEQ ID NO: 1439 - DNA, 20 bp, Artificial Sequence
  source: /note="Description of Artificial Sequence: Synthetic oligonucleotide"
  modified_base (8)..(20): a, c, t, g, unknown or other
gcgatgcnnnnnnnnnnnnn

SEQ ID NO: 1440 - DNA, 23 bp, Artificial Sequence
  source: /note="Description of Artificial Sequence: Synthetic oligonucleotide"
  modified_base (10)..(23): a, c, t, g, unknown or other
gacgcgatgnnnnnnnnnnnnnn

SEQ ID NO: 1441 - DNA, 20 bp, Artificial Sequence
  source: /note="Description of Artificial Sequence: Synthetic oligonucleotide"
  modified_base (8)..(20): a, c, t, g, unknown or other
gcgatggnnnnnnnnnnnnn

SEQ ID NO: 1442 - DNA, 24 bp, Artificial Sequence
  source: /note="Description of Artificial Sequence: Synthetic oligonucleotide"
  modified_base (11)..(24): a, c, t, g, unknown or other
gaaggcgatgnnnnnnnnnnnnnn

SEQ ID NO: 1443 - DNA, 25 bp, Artificial Sequence
  source: /note="Description of Artificial Sequence: Synthetic oligonucleotide"
  modified_base (12)..(25): a, c, t, g, unknown or other
gaagagcgatgnnnnnnnnnnnnnn

SEQ ID NO: 1444 - DNA, 20 bp, Artificial Sequence
  source: /note="Description of Artificial Sequence: Synthetic oligonucleotide"
  modified_base (8)..(20): a, c, t, g, unknown or other
gcgatggnnnnnnnnnnnnn

SEQ ID NO: 1445 - DNA, 23 bp, Artificial Sequence
  source: /note="Description of Artificial Sequence: Synthetic oligonucleotide"
  modified_base (10)..(23): a, c, t, g, unknown or other
acggcgatgnnnnnnnnnnnnnn

SEQ ID NO: 1446 - DNA, 20 bp, Artificial Sequence
  source: /note="Description of Artificial Sequence: Synthetic oligonucleotide"
  modified_base (8)..(20): a, c, t, g, unknown or other
gcgatgcnnnnnnnnnnnnn

SEQ ID NO: 1447 - DNA, 23 bp, Artificial Sequence
  source: /note="Description of Artificial Sequence: Synthetic oligonucleotide"
  modified_base (10)..(23): a, c, t, g, unknown or other
gaggcgatgnnnnnnnnnnnnnn

SEQ ID NO: 1448 - DNA, 18 bp, Artificial Sequence
  source: /note="Description of Artificial Sequence: Synthetic oligonucleotide"
  modified_base (10)..(18): a, c, t, g, unknown or other
cccacaygtnnnnnnnnn

SEQ ID NO: 1449 - DNA, 18 bp, Artificial Sequence
  source: /note="Description of Artificial Sequence: Synthetic oligonucleotide"
  modified_base (10)..(18): a, c, t, g, unknown or other
cccacagctnnnnnnnnn

SEQ ID NO: 1450 - DNA, 21 bp, Artificial Sequence
  source: /note="Description of Artificial Sequence: Synthetic oligonucleotide"
  modified_base (10)..(21): a, c, t, g, unknown or other
gggcccacannnnnnnnnnnn

SEQ ID NO: 1451 - DNA, 22 bp, Artificial Sequence
  source: /note="Description of Artificial Sequence: Synthetic oligonucleotide"
  modified_base (11)..(22): a, c, t, g, unknown or other
rgatcccacannnnnnnnnnnn

SEQ ID NO: 1452 - DNA, 20 bp, Artificial Sequence
  source: /note="Description of Artificial Sequence: Synthetic oligonucleotide"
  modified_base (9)..(20): a, c, t, g, unknown or other
ggcccacannnnnnnnnnnn

SEQ ID NO: 1453 - DNA, 18 bp, Artificial Sequence
  source: /note="Description of Artificial Sequence: Synthetic oligonucleotide"
  modified_base (9)..(18): a, c, t, g, unknown or other
cccacatgnnnnnnnnnn

SEQ ID NO: 1454 - DNA, 21 bp, Artificial Sequence
  source: /note="Description of Artificial Sequence: Synthetic oligonucleotide"
  modified_base (10)..(21): a, c, t, g, unknown or other
gatcccacannnnnnnnnnnn

SEQ ID NO: 1455 - DNA, 22 bp, Artificial Sequence
  source: /note="Description of Artificial Sequence: Synthetic oligonucleotide"
  modified_base (11)..(22): a, c, t, g, unknown or other
ggatcccacannnnnnnnnnnn

SEQ ID NO: 1456 - DNA, 21 bp, Artificial Sequence
  source: /note="Description of Artificial Sequence: Synthetic oligonucleotide"
  modified_base (10)..(21): a, c, t, g, unknown or other
grgcccacannnnnnnnnnnn

SEQ ID NO: 1457 - DNA, 21 bp, Artificial Sequence
  source: /note="Description of Artificial Sequence: Synthetic oligonucleotide"
  modified_base (10)..(21): a, c, t, g, unknown or other
ggwcccacannnnnnnnnnnn

SEQ ID NO: 1458 - DNA, 22 bp, Artificial Sequence
  source: /note="Description of Artificial Sequence: Synthetic oligonucleotide"
  modified_base (11)..(22): a, c, t, g, unknown or other
ggwccccacannnnnnnnnnnn

SEQ ID NO: 1459 - DNA, 21 bp, Artificial Sequence
  source: /note="Description of Artificial Sequence: Synthetic oligonucleotide"
  modified_base (10)..(21): a, c, t, g, unknown or other
ggwcccacannnnnnnnnnnn

SEQ ID NO: 1460 - DNA, 19 bp, Artificial Sequence
  source: /note="Description of Artificial Sequence: Synthetic oligonucleotide"
  modified_base (8)..(8): a, c, t, g, unknown or other
  modified_base (12)..(19): a, c, t, g, unknown or other
gcccacanggcnnnnnnnn

SEQ ID NO: 1461 - DNA, 20 bp, Artificial Sequence
  source: /note="Description of Artificial Sequence: Synthetic oligonucleotide"
  modified_base (9)..(20): a, c, t, g, unknown or other
ggcccacannnnnnnnnnnn

SEQ ID NO: 1462 - DNA, 21 bp, Artificial Sequence
  source: /note="Description of Artificial Sequence: Synthetic oligonucleotide"
  modified_base (10)..(21): a, c, t, g, unknown or other
gatcccacannnnnnnnnnnn

SEQ ID NO: 1463 - DNA, 18 bp, Artificial Sequence
  source: /note="Description of Artificial Sequence: Synthetic oligonucleotide"
  modified_base (7)..(10): a, c, t, g, unknown or other
  modified_base (14)..(18): a, c, t, g, unknown or other
cccacannnntggnnnnn

SEQ ID NO: 1464 - DNA, 22 bp, Artificial Sequence
  source: /note="Description of Artificial Sequence: Synthetic oligonucleotide"
  modified_base (3)..(3): a, c, t, g, unknown or other
  modified_base (11)..(22): a, c, t, g, unknown or other
ggnccccacannnnnnnnnnnn

SEQ ID NO: 1465 - DNA, 21 bp, Artificial Sequence
  source: /note="Description of Artificial Sequence: Synthetic oligonucleotide"
  modified_base (3)..(3): a, c, t, g, unknown or other
  modified_base (10)..(21): a, c, t, g, unknown or other
ggncccacannnnnnnnnnnn

SEQ ID NO: 1466 - DNA, 20 bp, Artificial Sequence
  source: /note="Description of Artificial Sequence: Synthetic oligonucleotide"
  modified_base (9)..(20): a, c, t, g, unknown or other
ggcccacannnnnnnnnnnn

SEQ ID NO: 1467 - DNA, 20 bp, Artificial Sequence
  source: /note="Description of Artificial Sequence: Synthetic oligonucleotide"
  modified_base (9)..(20): a, c, t, g, unknown or other
vgcccacannnnnnnnnnnn

SEQ ID NO: 1468 - DNA, 21 bp, Artificial Sequence
  source: /note="Description of Artificial Sequence: Synthetic oligonucleotide"
  modified_base (10)..(21): a, c, t, g, unknown or other
gtacccacannnnnnnnnnnn

SEQ ID NO: 1469 - DNA, 20 bp, Artificial Sequence
  source: /note="Description of Artificial Sequence: Synthetic oligonucleotide"
  modified_base (9)..(20): a, c, t, g, unknown or other
ggcccacannnnnnnnnnnn

SEQ ID NO: 1470 - DNA, 22 bp, Artificial Sequence
  source: /note="Description of Artificial Sequence: Synthetic oligonucleotide"
  modified_base (4)..(4): a, c, t, g, unknown or other
  modified_base (11)..(22): a, c, t, g, unknown or other
rggncccacannnnnnnnnnnn

SEQ ID NO: 1471 - DNA, 18 bp, Artificial Sequence
  source: /note="Description of Artificial Sequence: Synthetic oligonucleotide"
  modified_base (12)..(18): a, c, t, g, unknown or other
cccacaagcttnnnnnnn

SEQ ID NO: 1472 - DNA, 18 bp, Artificial Sequence
  source: /note="Description of Artificial Sequence: Synthetic oligonucleotide"
  modified_base (7)..(9): a, c, t, g, unknown or other
  modified_base (13)..(18): a, c, t, g, unknown or other
cccacannntggnnnnnn

SEQ ID NO: 1473 - DNA, 18 bp, Artificial Sequence
  source: /note="Description of Artificial Sequence: Synthetic oligonucleotide"
  modified_base (9)..(18): a, c, t, g, unknown or other
cccacatgnnnnnnnnnn

SEQ ID NO: 1474 - DNA, 22 bp, Artificial Sequence
  source: /note="Description of Artificial Sequence: Synthetic oligonucleotide"
  modified_base (11)..(22): a, c, t, g, unknown or other
ggyrcccacannnnnnnnnnnn

SEQ ID NO: 1475 - DNA, 18 bp, Artificial Sequence
  source: /note="Description of Artificial Sequence: Synthetic oligonucleotide"
  modified_base (9)..(18): a, c, t, g, unknown or other
cccacagtnnnnnnnnnn

SEQ ID NO: 1476 - DNA, 18 bp, Artificial Sequence
  source: /note="Description of Artificial Sequence: Synthetic oligonucleotide"
  modified_base (10)..(18): a, c, t, g, unknown or other
cccacattcnnnnnnnnn

SEQ ID NO: 1477 - DNA, 21 bp, Artificial Sequence
  source: /note="Description of Artificial Sequence: Synthetic oligonucleotide"
  modified_base (3)..(3): a, c, t, g, unknown or other
  modified_base (10)..(21): a, c, t, g, unknown or other
ggncccacannnnnnnnnnnn

SEQ ID NO: 1478 - DNA, 20 bp, Artificial Sequence
  source: /note="Description of Artificial Sequence: Synthetic oligonucleotide"
  modified_base (9)..(20): a, c, t, g, unknown or other
ggcccacannnnnnnnnnnn

SEQ ID NO: 1479 - DNA, 22 bp, Artificial Sequence
  source: /note="Description of Artificial Sequence: Synthetic oligonucleotide"
  modified_base (3)..(3): a, c, t, g, unknown or other
  modified_base (11)..(22): a, c, t, g, unknown or other
ggnccccacannnnnnnnnnnn

SEQ ID NO: 1480 - DNA, 21 bp, Artificial Sequence
  source: /note="Description of Artificial Sequence: Synthetic oligonucleotide"
  modified_base (3)..(3): a, c, t, g, unknown or other
  modified_base (10)..(21): a, c, t, g, unknown or other
ggncccacannnnnnnnnnnn

SEQ ID NO: 1481 - DNA, 20 bp, Artificial Sequence
  source: /note="Description of Artificial Sequence: Synthetic oligonucleotide"
  modified_base (9)..(20): a, c, t, g, unknown or other
ggcccacannnnnnnnnnnn

SEQ ID NO: 1482 - DNA, 20 bp, Artificial Sequence
  source: /note="Description of Artificial Sequence: Synthetic oligonucleotide"
  modified_base (9)..(20): a, c, t, g, unknown or other
rgcccacannnnnnnnnnnn

SEQ ID NO: 1483 - DNA, 22 bp, Artificial Sequence
  source: /note="Description of Artificial Sequence: Synthetic oligonucleotide"
  modified_base (3)..(4): a, c, t, g, unknown or other
  modified_base (11)..(22): a, c, t, g, unknown or other
ggnncccacannnnnnnnnnnn

SEQ ID NO: 1484 - DNA, 21 bp, Artificial Sequence
  source: /note="Description of Artificial Sequence: Synthetic oligonucleotide"
  modified_base (3)..(3): a, c, t, g, unknown or other
  modified_base (10)..(21): a, c, t, g, unknown or other
ggncccacannnnnnnnnnnn

SEQ ID NO: 1485 - DNA, 23 bp, Artificial Sequence
  source: /note="Description of Artificial Sequence: Synthetic oligonucleotide"
  modified_base (12)..(23): a, c, t, g, unknown or other
gctagcccacannnnnnnnnnnn

SEQ ID NO: 1486 - DNA, 18 bp, Artificial Sequence
  source: /note="Description of Artificial Sequence: Synthetic oligonucleotide"
  modified_base (10)..(18): a, c, t, g, unknown or other
cccacatgynnnnnnnnn

SEQ ID NO: 1487 - DNA, 20 bp, Artificial Sequence
  source: /note="Description of Artificial Sequence: Synthetic oligonucleotide"
  modified_base (9)..(20): a, c, t, g, unknown or other
cccccacannnnnnnnnnnn

SEQ ID NO: 1488 - DNA, 18 bp, Artificial Sequence
  source: /note="Description of Artificial Sequence: Synthetic oligonucleotide"
  modified_base (11)..(18): a, c, t, g, unknown or other
cccacagctgnnnnnnnn

SEQ ID NO: 1489 - DNA, 22 bp, Artificial Sequence
  source: /note="Description of Artificial Sequence: Synthetic oligonucleotide"
  modified_base (11)..(22): a, c, t, g, unknown or other
rgatcccacannnnnnnnnnnn

SEQ ID NO: 1490 - DNA, 18 bp, Artificial Sequence
  source: /note="Description of Artificial Sequence: Synthetic oligonucleotide"
  modified_base (10)..(18): a, c, t, g, unknown or other
cccacastgnnnnnnnnn

SEQ ID NO: 1491 - DNA, 22 bp, Artificial Sequence
  source: /note="Description of Artificial Sequence: Synthetic oligonucleotide"
  modified_base (11)..(22): a, c, t, g, unknown or other
tccgcccacannnnnnnnnnnn

SEQ ID NO: 1492 - DNA, 18 bp, Artificial Sequence
  source: /note="Description of Artificial Sequence: Synthetic oligonucleotide"
  modified_base (10)..(18): a, c, t, g, unknown or other
cccacatccnnnnnnnnn

SEQ ID NO: 1493 - DNA, 18 bp, Artificial Sequence
  source: /note="Description of Artificial Sequence: Synthetic oligonucleotide"
  modified_base (10)..(18): a, c, t, g, unknown or other
cccacatccnnnnnnnnn

SEQ ID NO: 1494 - DNA, 15 bp, Artificial Sequence
  source: /note="Description of Artificial Sequence: Synthetic oligonucleotide"
  modified_base (12)..(15): a, c, t, g, unknown or other
cacctgccwggnnnn

SEQ ID NO: 1495 - DNA, 15 bp, Artificial Sequence
  source: /note="Description of Artificial Sequence: Synthetic oligonucleotide"
  modified_base (10)..(15): a, c, t, g, unknown or other
cacctgcagnnnnnn

SEQ ID NO: 1496 - DNA, 15 bp, Artificial Sequence
  source: /note="Description of Artificial Sequence: Synthetic oligonucleotide"
  modified_base (10)..(15): a, c, t, g, unknown or other
cacctgcggnnnnnn

SEQ ID NO: 1497 - DNA, 15 bp, Artificial Sequence
  source: /note="Description of Artificial Sequence: Synthetic oligonucleotide"
  modified_base (11)..(15): a, c, t, g, unknown or other
cacctgccgcnnnnn

SEQ ID NO: 1498 - DNA, 15 bp, Artificial Sequence
  source: /note="Description of Artificial Sequence: Synthetic oligonucleotide"
  modified_base (10)..(15): a, c, t, g, unknown or other
cacctgcagnnnnnn

SEQ ID NO: 1499 - DNA, 15 bp, Artificial Sequence
  source: /note="Description of Artificial Sequence: Synthetic oligonucleotide"
  modified_base (10)..(15): a, c, t, g, unknown or other
cacctgcagnnnnnn

SEQ ID NO: 1500 - DNA, 15 bp, Artificial Sequence
  source: /note="Description of Artificial Sequence: Synthetic oligonucleotide"
  modified_base (12)..(15): a, c, t, g, unknown or other
cacctgccggynnnn

SEQ ID NO: 1501 - DNA, 18 bp, Artificial Sequence
  source: /note="Description of Artificial Sequence: Synthetic oligonucleotide"
  modified_base (11)..(18): a, c, t, g, unknown or other
gatcacctgcnnnnnnnn

SEQ ID NO: 1502 - DNA, 15 bp, Artificial Sequence
  source: /note="Description of Artificial Sequence: Synthetic oligonucleotide"
  modified_base (11)..(15): a, c, t, g, unknown or other
cacctgcwgcnnnnn

SEQ ID NO: 1503 - DNA, 15 bp, Artificial Sequence
  source: /note="Description of Artificial Sequence: Synthetic oligonucleotide"
  modified_base (11)..(15): a, c, t, g, unknown or other
cacctgctgcnnnnn

SEQ ID NO: 1504 - DNA, 15 bp, Artificial Sequence
  source: /note="Description of Artificial Sequence: Synthetic oligonucleotide"
  modified_base (11)..(15): a, c, t, g, unknown or other
cacctgcagcnnnnn

SEQ ID NO: 1505 - DNA, 19 bp, Artificial Sequence
  source: /note="Description of Artificial Sequence: Synthetic oligonucleotide"
  modified_base (12)..(19): a, c, t, g, unknown or other
ggwccacctgcnnnnnnnn

SEQ ID NO: 1506 - DNA, 15 bp, Artificial Sequence
  source: /note="Description of Artificial Sequence: Synthetic oligonucleotide"
  modified_base (11)..(15): a, c, t, g, unknown or other
cacctgcgcgnnnnn

SEQ ID NO: 1507 - DNA, 18 bp, Artificial Sequence
  source: /note="Description of Artificial Sequence: Synthetic oligonucleotide"
  modified_base (11)..(18): a, c, t, g, unknown or other
gatcacctgcnnnnnnnn

SEQ ID NO: 1508 - DNA, 18 bp, Artificial Sequence
  source: /note="Description of Artificial Sequence: Synthetic oligonucleotide"
  modified_base (11)..(18): a, c, t, g, unknown or other
ggtcacctgcnnnnnnnn

SEQ ID NO: 1509 - DNA, 16 bp, Artificial Sequence
  source: /note="Description of Artificial Sequence: Synthetic oligonucleotide"
  modified_base (9)..(9): a, c, t, g, unknown or other
  modified_base (13)..(16): a, c, t, g, unknown or other
ccacctgcntggnnnn

SEQ ID NO: 1510 - DNA, 15 bp, Artificial Sequence
  source: /note="Description of Artificial Sequence: Synthetic oligonucleotide"
  modified_base (11)..(15): a, c, t, g, unknown or other
cacctgccggnnnnn

SEQ ID NO: 1511 - DNA, 15 bp, Artificial Sequence
  source: /note="Description of Artificial Sequence: Synthetic oligonucleotide"
  modified_base (11)..(15): a, c, t, g, unknown or other
cacctgctagnnnnn

SEQ ID NO: 1512 - DNA, 15 bp, Artificial Sequence
  source: /note="Description of Artificial Sequence: Synthetic oligonucleotide"
  modified_base (8)..(9): a, c, t, g, unknown or other
  modified_base (12)..(15): a, c, t, g, unknown or other
cacctgcnngcnnnn

SEQ ID NO: 1513 - DNA, 15 bp, Artificial Sequence
  source: /note="Description of Artificial Sequence: Synthetic oligonucleotide"
  modified_base (8)..(8): a, c, t, g, unknown or other
  modified_base (11)..(15): a, c, t, g, unknown or other
cacctgcngcnnnnn

SEQ ID NO: 1514 - DNA, 15 bp, Artificial Sequence
  source: /note="Description of Artificial Sequence: Synthetic oligonucleotide"
  modified_base (12)..(15): a, c, t, g, unknown or other
cacctgccwggnnnn

SEQ ID NO: 1515 - DNA, 19 bp, Artificial Sequence
  source: /note="Description of Artificial Sequence: Synthetic oligonucleotide"
  modified_base (3)..(3): a, c, t, g, unknown or other
  modified_base (12)..(19): a, c, t, g, unknown or other
ggnccacctgcnnnnnnnn

SEQ ID NO: 1516 - DNA, 15 bp, Artificial Sequence
  source: /note="Description of Artificial Sequence: Synthetic oligonucleotide"
  modified_base (12)..(15): a, c, t, g, unknown or other
cacctgccggcnnnn

SEQ ID NO: 1517 - DNA, 17 bp, Artificial Sequence
  source: /note="Description of Artificial Sequence: Synthetic oligonucleotide"
  modified_base (10)..(17): a, c, t, g, unknown or other
tgcacctgcnnnnnnnn

SEQ ID NO: 1518 - DNA, 15 bp, Artificial Sequence
  source: /note="Description of Artificial Sequence: Synthetic oligonucleotide"
  modified_base (9)..(15): a, c, t, g, unknown or other
cacctgcannnnnnn

SEQ ID NO: 1519 - DNA, 18 bp, Artificial Sequence
  source: /note="Description of Artificial Sequence: Synthetic oligonucleotide"
  modified_base (11)..(18): a, c, t, g, unknown or other
gtacacctgcnnnnnnnn

SEQ ID NO: 1520 - DNA, 15 bp, Artificial Sequence
  source: /note="Description of Artificial Sequence: Synthetic oligonucleotide"
  modified_base (9)..(9): a, c, t, g, unknown or other
  modified_base (12)..(15): a, c, t, g, unknown or other
cacctgctnagnnnn

SEQ ID NO: 1521 - DNA, 15 bp, Artificial Sequence
  source: /note="Description of Artificial Sequence: Synthetic oligonucleotide"
  modified_base (10)..(15): a, c, t, g, unknown or other
cacctgcagnnnnnn

SEQ ID NO: 1522 - DNA, 16 bp, Artificial Sequence
  source: /note="Description of Artificial Sequence: Synthetic oligonucleotide"
  modified_base (12)..(16): a, c, t, g, unknown or other
ccacctgctggnnnnn

SEQ ID NO: 1523 - DNA, 15 bp, Artificial Sequence
  source: /note="Description of Artificial Sequence: Synthetic oligonucleotide"
  modified_base (11)..(15): a, c, t, g, unknown or other
cacctgcatgnnnnn

SEQ ID NO: 1524 - DNA, 15 bp, Artificial Sequence
  source: /note="Description of Artificial Sequence: Synthetic oligonucleotide"
  modified_base (11)..(15): a, c, t, g, unknown or other
cacctgcgcgnnnnn

SEQ ID NO: 1525 - DNA, 15 bp, Artificial Sequence
  source: /note="Description of Artificial Sequence: Synthetic oligonucleotide"
  modified_base (11)..(15): a, c, t, g, unknown or other
cacctgccggnnnnn

SEQ ID NO: 1526 - DNA, 17 bp, Artificial Sequence
  source: /note="Description of Artificial Sequence: Synthetic oligonucleotide"
  modified_base (10)..(17): a, c, t, g, unknown or other
ggcacctgcnnnnnnnn

SEQ ID NO: 1527 - DNA, 15 bp, Artificial Sequence
  source: /note="Description of Artificial Sequence: Synthetic oligonucleotide"
  modified_base (10)..(15): a, c, t, g, unknown or other
cacctgcgcnnnnnn

SEQ ID NO: 1528 - DNA, 15 bp, Artificial Sequence
  source: /note="Description of Artificial Sequence: Synthetic oligonucleotide"
  modified_base (12)..(15): a, c, t, g, unknown or other
cacctgcwgcknnnn

SEQ ID NO: 1529 - DNA, 18 bp, Artificial Sequence
  source: /note="Description of Artificial Sequence: Synthetic oligonucleotide"
  modified_base (3)..(3): a, c, t, g, unknown or other
  modified_base (11)..(18): a, c, t, g, unknown or other
gtncacctgcnnnnnnnn

SEQ ID NO: 1530 - DNA, 15 bp, Artificial Sequence
  source: /note="Description of Artificial Sequence: Synthetic oligonucleotide"
  modified_base (9)..(9): a, c, t, g, unknown or other
  modified_base (12)..(15): a, c, t, g, unknown or other
cacctgctnagnnnn

SEQ ID NO: 1531 - DNA, 15 bp, Artificial Sequence
  source: /note="Description of Artificial Sequence: Synthetic oligonucleotide"
  modified_base (10)..(15): a, c, t, g, unknown or other
cacctgcagnnnnnn

SEQ ID NO: 1532 - DNA, 17 bp, Artificial Sequence
  source: /note="Description of Artificial Sequence: Synthetic oligonucleotide"
  modified_base (10)..(17): a, c, t, g, unknown or other
gtcacctgcnnnnnnnn

SEQ ID NO: 1533 - DNA, 15 bp, Artificial Sequence
  source: /note="Description of Artificial Sequence: Synthetic oligonucleotide"
  modified_base (11)..(15): a, c, t, g, unknown or other
cacctgcctcnnnnn

SEQ ID NO: 1534 - DNA, 19 bp, Artificial Sequence
  source: /note="Description of Artificial Sequence: Synthetic oligonucleotide"
  modified_base (3)..(3): a, c, t, g, unknown or other
  modified_base (12)..(19): a, c, t, g, unknown or other
ggnccacctgcnnnnnnnn

SEQ ID NO: 1535 - DNA, 15 bp, Artificial Sequence
  source: /note="Description of Artificial Sequence: Synthetic oligonucleotide"
  modified_base (12)..(15): a, c, t, g, unknown or other
cacctgcctggnnnn

SEQ ID NO: 1536 - DNA, 15 bp, Artificial Sequence
  source: /note="Description of Artificial Sequence: Synthetic oligonucleotide"
  modified_base (12)..(15): a, c, t, g, unknown or other
cacctgccwggnnnn

SEQ ID NO: 1537 - DNA, 17 bp, Artificial Sequence
  source: /note="Description of Artificial Sequence: Synthetic oligonucleotide"
  modified_base (10)..(17): a, c, t, g, unknown or other
ggcacctgcnnnnnnnn

SEQ ID NO: 1538 - DNA, 20 bp, Artificial Sequence
  source: /note="Description of Artificial Sequence: Synthetic oligonucleotide"
  modified_base (13)..(20): a, c, t, g, unknown or other
gctagcacctgcnnnnnnnn

SEQ ID NO: 1539 - DNA, 15 bp, Artificial Sequence
  source: /note="Description of Artificial Sequence: Synthetic oligonucleotide"
  modified_base (12)..(15): a, c, t, g, unknown or other
cacctgctagcnnnn

SEQ ID NO: 1540 - DNA, 15 bp, Artificial Sequence
  source: /note="Description of Artificial Sequence: Synthetic oligonucleotide"
  modified_base (12)..(15): a, c, t, g, unknown or other
cacctgcgcgcnnnn

SEQ ID NO: 1541 - DNA, 15 bp, Artificial Sequence
  source: /note="Description of Artificial Sequence: Synthetic oligonucleotide"
  modified_base (12)..(15): a, c, t, g, unknown or other
cacctgccggbnnnn

SEQ ID NO: 1542 - DNA, 15 bp, Artificial Sequence
  source: /note="Description of Artificial Sequence: Synthetic oligonucleotide"
  modified_base (12)..(15): a, c, t, g, unknown or other
cacctgccagannnn

SEQ ID NO: 1543 - DNA, 15 bp, Artificial Sequence
  source: /note="Description of Artificial Sequence: Synthetic oligonucleotide"
  modified_base (12)..(15): a, c, t, g, unknown or other
cacctgcatgynnnn

SEQ ID NO: 1544 - DNA, 15 bp, Artificial Sequence
  source: /note="Description of Artificial Sequence: Synthetic oligonucleotide"
  modified_base (11)..(15): a, c, t, g, unknown or other
cacctgctagnnnnn

SEQ ID NO: 1545 - DNA, 18 bp, Artificial Sequence
  source: /note="Description of Artificial Sequence: Synthetic oligonucleotide"
  modified_base (11)..(18): a, c, t, g, unknown or other
gaccacctgcnnnnnnnn

SEQ ID NO: 1546 - DNA, 15 bp, Artificial Sequence
  source: /note="Description of Artificial Sequence: Synthetic oligonucleotide"
  modified_base (12)..(15): a, c, t, g, unknown or other
cacctgcastgnnnn

SEQ ID NO: 1547 - DNA, 15 bp, Artificial Sequence
  source: /note="Description of Artificial Sequence: Synthetic oligonucleotide"
  modified_base (12)..(15): a, c, t, g, unknown or other
cacctgcgcgcnnnn

SEQ ID NO: 1548 - DNA, 15 bp, Artificial Sequence
  source: /note="Description of Artificial Sequence: Synthetic oligonucleotide"
  modified_base (12)..(15): a, c, t, g, unknown or other
cacctgccagtnnnn

SEQ ID NO: 1549 - DNA, 15 bp, Artificial Sequence
  source: /note="Description of Artificial Sequence: Synthetic oligonucleotide"
  modified_base (11)..(15): a, c, t, g, unknown or other
cacctgccgcnnnnn

SEQ ID NO: 1550 - DNA, 15 bp, Artificial Sequence
  source: /note="Description of Artificial Sequence: Synthetic oligonucleotide"
  modified_base (11)..(15): a, c, t, g, unknown or other
cacctgcgtcnnnnn

SEQ ID NO: 1551 - DNA, 16 bp, Artificial Sequence
  source: /note="Description of Artificial Sequence: Synthetic oligonucleotide"
  modified_base (9)..(16): a, c, t, g, unknown or other
tcacctgcnnnnnnnn

SEQ ID NO: 1552 - DNA, 15 bp, Artificial Sequence
  source: /note="Description of Artificial Sequence: Synthetic oligonucleotide"
  modified_base (12)..(15): a, c, t, g, unknown or other
cacctgccttcnnnn

SEQ ID NO: 1553 - DNA, 15 bp, Artificial Sequence
  source: /note="Description of Artificial Sequence: Synthetic oligonucleotide"
  modified_base (11)..(15): a, c, t, g, unknown or other
cacctgccgtnnnnn

SEQ ID NO: 1554 - DNA, 15 bp, Artificial Sequence
  source: /note="Description of Artificial Sequence: Synthetic oligonucleotide"
  modified_base (11)..(15): a, c, t, g, unknown or other
cacctgcctcnnnnn

SEQ ID NO: 1555 - DNA, 15 bp, Artificial Sequence
  source: /note="Description of Artificial Sequence: Synthetic oligonucleotide"
  modified_base (12)..(15): a, c, t, g, unknown or other
ccwggctcttcnnnn

SEQ ID NO: 1556 - DNA, 14 bp, Artificial Sequence
  source: /note="Description of Artificial Sequence: Synthetic oligonucleotide"
  modified_base (11)..(14): a, c, t, g, unknown or other
gcggctcttcnnnn

SEQ ID NO: 1557 - DNA, 13 bp, Artificial Sequence
  source: /note="Description of Artificial Sequence: Synthetic oligonucleotide"
  modified_base (10)..(13): a, c, t, g, unknown or other
ccgctcttcnnnn

SEQ ID NO: 1558 - DNA, 12 bp, Artificial Sequence
  source: /note="Description of Artificial Sequence: Synthetic oligonucleotide"
  modified_base (9)..(12): a, c, t, g, unknown or other
agctcttcnnnn

SEQ ID NO: 1559 - DNA, 12 bp, Artificial Sequence
  source: /note="Description of Artificial Sequence: Synthetic oligonucleotide"
  modified_base (9)..(12): a, c, t, g, unknown or other
agctcttcnnnn

SEQ ID NO: 1560 - DNA, 16 bp, Artificial Sequence
  source: /note="Description of Artificial Sequence: Synthetic oligonucleotide"
  modified_base (13)..(16): a, c, t, g, unknown or other
cggccgctcttcnnnn

SEQ ID NO: 1561 - DNA, 16 bp, Artificial Sequence
  source: /note="Description of Artificial Sequence: Synthetic oligonucleotide"
  modified_base (13)..(16): a, c, t, g, unknown or other
cycgrgctcttcnnnn

SEQ ID NO: 1562 - DNA, 17 bp, Artificial Sequence
  source: /note="Description of Artificial Sequence: Synthetic oligonucleotide"
  modified_base (14)..(17): a, c, t, g, unknown or other
gcgatcgctcttcnnnn

SEQ ID NO: 1563 - DNA, 13 bp, Artificial Sequence
  source: /note="Description of Artificial Sequence: Synthetic oligonucleotide"
  modified_base (10)..(13): a, c, t, g, unknown or other
gagctcttcnnnn

SEQ ID NO: 1564 - DNA, 15 bp, Artificial Sequence
  source: /note="Description of Artificial Sequence: Synthetic oligonucleotide"
  modified_base (12)..(15): a, c, t, g, unknown or other
rccggctcttcnnnn

SEQ ID NO: 1565 - DNA, 14 bp, Artificial Sequence
  source: /note="Description of Artificial Sequence: Synthetic oligonucleotide"
  modified_base (11)..(14): a, c, t, g, unknown or other
gcwgctcttcnnnn

SEQ ID NO: 1566 - DNA, 13 bp, Artificial Sequence
  source: /note="Description of Artificial Sequence: Synthetic oligonucleotide"
  modified_base (10)..(13): a, c, t, g, unknown or other
grgctcttcnnnn

SEQ ID NO: 1567 - DNA, 14 bp, Artificial Sequence
  source: /note="Description of Artificial Sequence: Synthetic oligonucleotide"
  modified_base (11)..(14): a, c, t, g, unknown or other
gctgctcttcnnnn

SEQ ID NO: 1568 - DNA, 14 bp, Artificial Sequence
  source: /note="Description of Artificial Sequence: Synthetic oligonucleotide"
  modified_base (11)..(14): a, c, t, g, unknown or other
gcagctcttcnnnn

SEQ ID NO: 1569 - DNA, 16 bp, Artificial Sequence
  source: /note="Description of Artificial Sequence: Synthetic oligonucleotide"
  modified_base (13)..(16): a, c, t, g, unknown or other
ctcgagctcttcnnnn

SEQ ID NO: 1570 - DNA, 14 bp, Artificial Sequence
  source: /note="Description of Artificial Sequence: Synthetic oligonucleotide"
  modified_base (11)..(14): a, c, t, g, unknown or other
cgcgctcttcnnnn

SEQ ID NO: 1571 - DNA, 20 bp, Artificial Sequence
  source: /note="Description of Artificial Sequence: Synthetic oligonucleotide"
  modified_base (4)..(8): a, c, t, g, unknown or other
  modified_base (17)..(20): a, c, t, g, unknown or other
gccnnnnnggctcttcnnnn

SEQ ID NO: 1572 - DNA, 13 bp, Artificial Sequence
  source: /note="Description of Artificial Sequence: Synthetic oligonucleotide"
  modified_base (10)..(13): a, c, t, g, unknown or other
sagctcttcnnnn

SEQ ID NO: 1573 - DNA, 16 bp, Artificial Sequence
  source: /note="Description of Artificial Sequence: Synthetic oligonucleotide"
  modified_base (13)..(16): a, c, t, g, unknown or other
cycgrgctcttcnnnn

SEQ ID NO: 1574 - DNA, 14 bp, Artificial Sequence
  source: /note="Description of Artificial Sequence: Synthetic oligonucleotide"
  modified_base (11)..(14): a, c, t, g, unknown or other
ccggctcttcnnnn

SEQ ID NO: 1575 - DNA, 14 bp, Artificial Sequence
  source: /note="Description of Artificial Sequence: Synthetic oligonucleotide"
  modified_base (11)..(14): a, c, t, g, unknown or other
ctagctcttcnnnn

SEQ ID NO: 1576 - DNA, 15 bp, Artificial Sequence
  source: /note="Description of Artificial Sequence: Synthetic oligonucleotide"
  modified_base (3)..(4): a, c, t, g, unknown or other
  modified_base (12)..(15): a, c, t, g, unknown or other
gcnngctcttcnnnn

SEQ ID NO: 1577 - DNA, 14 bp, Artificial Sequence
  source: /note="Description of Artificial Sequence: Synthetic oligonucleotide"
  modified_base (3)..(3): a, c, t, g, unknown or other
  modified_base (11)..(14): a, c, t, g, unknown or other
gcngctcttcnnnn

SEQ ID NO: 1578 - DNA, 16 bp, Artificial Sequence
  source: /note="Description of Artificial Sequence: Synthetic oligonucleotide"
  modified_base (13)..(16): a, c, t, g, unknown or other
ccwwggctcttcnnnn

SEQ ID NO: 1579 - DNA, 15 bp, Artificial Sequence
  source: /note="Description of Artificial Sequence: Synthetic oligonucleotide"
  modified_base (12)..(15): a, c, t, g, unknown or other
ccwggctcttcnnnn

SEQ ID NO: 1580 - DNA, 15 bp, Artificial Sequence
  source: /note="Description of Artificial Sequence: Synthetic oligonucleotide"
  modified_base (12)..(15): a, c, t, g, unknown or other
gccggctcttcnnnn

SEQ ID NO: 1581 - DNA, 12 bp, Artificial Sequence
  source: /note="Description of Artificial Sequence: Synthetic oligonucleotide"
  modified_base (9)..(12): a, c, t, g, unknown or other
vgctcttcnnnn

SEQ ID NO: 1582 - DNA, 15 bp, Artificial Sequence
  source: /note="Description of Artificial Sequence: Synthetic oligonucleotide"
  modified_base (3)..(3): a, c, t, g, unknown or other
  modified_base (12)..(15): a, c, t, g, unknown or other
ctnagctcttcnnnn

SEQ ID NO: 1583 - DNA, 14 bp, Artificial Sequence
  source: /note="Description of Artificial Sequence: Synthetic oligonucleotide"
  modified_base (11)..(14): a, c, t, g, unknown or other
catgctcttcnnnn

SEQ ID NO: 1584 - DNA, 14 bp, Artificial Sequence
  source: /note="Description of Artificial Sequence: Synthetic oligonucleotide"
  modified_base (11)..(14): a, c, t, g, unknown or other
cgcgctcttcnnnn

SEQ ID NO: 1585 - DNA, 14 bp, Artificial Sequence
  source: /note="Description of Artificial Sequence: Synthetic oligonucleotide"
  modified_base (11)..(14): a, c, t, g, unknown or other
ccggctcttcnnnn

SEQ ID NO: 1586 - DNA, 13 bp, Artificial Sequence
  source: /note="Description of Artificial Sequence: Synthetic oligonucleotide"
  modified_base (10)..(13): a, c, t, g, unknown or other
gcgctcttcnnnn

SEQ ID NO: 1587 - DNA, 15 bp, Artificial Sequence
  source: /note="Description of Artificial Sequence: Synthetic oligonucleotide"
  modified_base (12)..(15): a, c, t, g, unknown or other
mgcwgctcttcnnnn

SEQ ID NO: 1588 - DNA, 15 bp, Artificial Sequence
  source: /note="Description of Artificial Sequence: Synthetic oligonucleotide"
  modified_base (3)..(3): a, c, t, g, unknown or other
  modified_base (12)..(15): a, c, t, g, unknown or other
ctnagctcttcnnnn

SEQ ID NO: 1589 - DNA, 16 bp, Artificial Sequence
  source: /note="Description of Artificial Sequence: Synthetic oligonucleotide"
  modified_base (3)..(4): a, c, t, g, unknown or other
  modified_base (13)..(16): a, c, t, g, unknown or other
ccnnggctcttcnnnn

SEQ ID NO: 1590 - DNA, 14 bp, Artificial Sequence
  source: /note="Description of Artificial Sequence: Synthetic oligonucleotide"
  modified_base (11)..(14): a, c, t, g, unknown or other
gaggctcttcnnnn

SEQ ID NO: 1591 - DNA, 12 bp, Artificial Sequence
  source: /note="Description of Artificial Sequence: Synthetic oligonucleotide"
  modified_base (9)..(12): a, c, t, g, unknown or other
agctcttcnnnn

SEQ ID NO: 1592 - DNA, 12 bp, Artificial Sequence
  source: /note="Description of Artificial Sequence: Synthetic oligonucleotide"
  modified_base (9)..(12): a, c, t, g, unknown or other
rgctcttcnnnn

SEQ ID NO: 1593 - DNA, 15 bp, Artificial Sequence
  source: /note="Description of Artificial Sequence: Synthetic oligonucleotide"
  modified_base (12)..(15): a, c, t, g, unknown or other
ccaggctcttcnnnn

SEQ ID NO: 1594 - DNA, 15 bp, Artificial Sequence
  source: /note="Description of Artificial Sequence: Synthetic oligonucleotide"
  modified_base (12)..(15): a, c, t, g, unknown or other
ccwggctcttcnnnn

SEQ ID NO: 1595 - DNA, 14 bp, Artificial Sequence
  source: /note="Description of Artificial Sequence: Synthetic oligonucleotide"
  modified_base (11)..(14): a, c, t, g, unknown or other
rgcgctcttcnnnn

SEQ ID NO: 1596 - DNA, 15 bp, Artificial Sequence
  source: /note="Description of Artificial Sequence: Synthetic oligonucleotide"
  modified_base (12)..(15): a, c, t, g, unknown or other
gctagctcttcnnnn

SEQ ID NO: 1597 - DNA, 15 bp, Artificial Sequence
  source: /note="Description of Artificial Sequence: Synthetic oligonucleotide"
  modified_base (12)..(15): a, c, t, g, unknown or other
gcgcgctcttcnnnn

SEQ ID NO: 1598 - DNA, 15 bp, Artificial Sequence
  source: /note="Description of Artificial Sequence: Synthetic oligonucleotide"
  modified_base (12)..(15): a, c, t, g, unknown or other
vccggctcttcnnnn

SEQ ID NO: 1599 - DNA, 15 bp, Artificial Sequence
  source: /note="Description of Artificial Sequence: Synthetic oligonucleotide"
  modified_base (12)..(15): a, c, t, g, unknown or other
tctggctcttcnnnn

SEQ ID NO: 1600 - DNA, 16 bp, Artificial Sequence
  source: /note="Description of Artificial Sequence: Synthetic oligonucleotide"
  modified_base (13)..(16): a, c, t, g, unknown or other
ctcgagctcttcnnnn

SEQ ID NO: 1601 - DNA, 15 bp, Artificial Sequence
  source: /note="Description of Artificial Sequence: Synthetic oligonucleotide"
  modified_base (12)..(15): a, c, t, g, unknown or other
rcatgctcttcnnnn

SEQ ID NO: 1602 - DNA, 13 bp, Artificial Sequence
  source: /note="Description of Artificial Sequence: Synthetic oligonucleotide"
  modified_base (10)..(13): a, c, t, g, unknown or other
cagctcttcnnnn

SEQ ID NO: 1603 - DNA, 16 bp, Artificial Sequence
  source: /note="Description of Artificial Sequence: Synthetic oligonucleotide"
  modified_base (13)..(16): a, c, t, g, unknown or other
ccatggctcttcnnnn

SEQ ID NO: 1604 - DNA, 16 bp, Artificial Sequence
  source: /note="Description of Artificial Sequence: Synthetic oligonucleotide"
  modified_base (13)..(16): a, c, t, g, unknown or other
cgatcgctcttcnnnn

SEQ ID NO: 1605 - DNA, 14 bp, Artificial Sequence
  source: /note="Description of Artificial Sequence: Synthetic oligonucleotide"
  modified_base (11)..(14): a, c, t, g, unknown or other
ctagctcttcnnnn

SEQ ID NO: 1606 - DNA, 13 bp, Artificial Sequence
  source: /note="Description of Artificial Sequence: Synthetic oligonucleotide"
  modified_base (10)..(13): a, c, t, g, unknown or other
gagctcttcnnnn

SEQ ID NO: 1607 - DNA, 16 bp, Artificial Sequence
  source: /note="Description of Artificial Sequence: Synthetic oligonucleotide"
  modified_base (13)..(16): a, c, t, g, unknown or other
ccatggctcttcnnnn

SEQ ID NO: 1608 - DNA, 16 bp, Artificial Sequence
  source: /note="Description of Artificial Sequence: Synthetic oligonucleotide"
  modified_base (13)..(16): a, c, t, g, unknown or other
ccwwggctcttcnnnn

SEQ ID NO: 1609 - DNA, 13 bp, Artificial Sequence
  source: /note="Description of Artificial Sequence: Synthetic oligonucleotide"
  modified_base (10)..(13): a, c, t, g, unknown or other
ccgctcttcnnnn

SEQ ID NO: 1610 - DNA, 15 bp, Artificial Sequence
  source: /note="Description of Artificial Sequence: Synthetic oligonucleotide"
  modified_base (12)..(15): a, c, t, g, unknown or other
castgctcttcnnnn

SEQ ID NO: 1611 - DNA, 14 bp, Artificial Sequence
  source: /note="Description of Artificial Sequence: Synthetic oligonucleotide"
  modified_base (11)..(14): a, c, t, g, unknown or other
gaagctcttcnnnn

SEQ ID NO: 1612 - DNA, 15 bp, Artificial Sequence
  source: /note="Description of Artificial Sequence: Synthetic oligonucleotide"
  modified_base (12)..(15): a, c, t, g, unknown or other
gcgcgctcttcnnnn

SEQ ID NO: 1613 - DNA, 15 bp, Artificial Sequence
  source: /note="Description of Artificial Sequence: Synthetic oligonucleotide"
  modified_base (12)..(15): a, c, t, g, unknown or other
actggctcttcnnnn

SEQ ID NO: 1614 - DNA, 14 bp, Artificial Sequence
  source: /note="Description of Artificial Sequence: Synthetic oligonucleotide"
  modified_base (11)..(14): a, c, t, g, unknown or other
gcggctcttcnnnn

SEQ ID NO: 1615 - DNA, 14 bp, Artificial Sequence
  source: /note="Description of Artificial Sequence: Synthetic oligonucleotide"
  modified_base (11)..(14): a, c, t, g, unknown or other
gacgctcttcnnnn

SEQ ID NO: 1616 - DNA, 15 bp, Artificial Sequence
  source: /note="Description of Artificial Sequence: Synthetic oligonucleotide"
  modified_base (12)..(15): a, c, t, g, unknown or other
gaaggctcttcnnnn

SEQ ID NO: 1617 - DNA, 14 bp, Artificial Sequence
  source: /note="Description of Artificial Sequence: Synthetic oligonucleotide"
  modified_base (11)..(14): a, c, t, g, unknown or other
acggctcttcnnnn

SEQ ID NO: 1618 - DNA, 14 bp, Artificial Sequence
  source: /note="Description of Artificial Sequence: Synthetic oligonucleotide"
  modified_base (11)..(14): a, c, t, g, unknown or other
gaggctcttcnnnn

SEQ ID NO: 1619 - DNA, 13 bp, Artificial Sequence
  source: /note="Description of Artificial Sequence: Synthetic oligonucleotide"
  modified_base (5)..(10): a, c, t, g, unknown or other
ggcannnnnntga

SEQ ID NO: 1620 - DNA, 13 bp, Artificial Sequence
  source: /note="Description of Artificial Sequence: Synthetic oligonucleotide"
  modified_base (4)..(10): a, c, t, g, unknown or other
gcannnnnnntcg

SEQ ID NO: 1621 - DNA, 13 bp, Artificial Sequence
  source: /note="Description of Artificial Sequence: Synthetic oligonucleotide"
  modified_base (4)..(10): a, c, t, g, unknown or other
gagnnnnnnntgg

SEQ ID NO: 1622 - DNA, 12 bp, Artificial Sequence
  source: /note="Description of Artificial Sequence: Synthetic oligonucleotide"
  modified_base (4)..(8): a, c, t, g, unknown or other
gagnnnnnrtgt

SEQ ID NO: 1623 - DNA, 12 bp, Artificial Sequence
  source: /note="Description of Artificial Sequence: Synthetic oligonucleotide"
  modified_base (4)..(9): a, c, t, g, unknown or other
caynnnnnntca

SEQ ID NO: 1624 - DNA, 15 bp, Artificial Sequence
  source: /note="Description of Artificial Sequence: Synthetic oligonucleotide"
  modified_base (5)..(12): a, c, t, g, unknown or other
ccaannnnnnnntgc

SEQ ID NO: 1625 - DNA, 18 bp, Artificial Sequence
  source: /note="Description of Artificial Sequence: Synthetic oligonucleotide"
  modified_base (7)..(10): a, c, t, g, unknown or other
  modified_base (14)..(18): a, c, t, g, unknown or other
ggcagcnnnntgannnnn

SEQ ID NO: 1626 - DNA, 17 bp, Artificial Sequence
  source: /note="Description of Artificial Sequence: Synthetic oligonucleotide"
  modified_base (6)..(10): a, c, t, g, unknown or other
  modified_base (14)..(17): a, c, t, g, unknown or other
gcagcnnnnntcgnnnn

SEQ ID NO: 1627 - DNA, 26 bp, Artificial Sequence
  source: /note="Description of Artificial Sequence: Synthetic oligonucleotide"
  modified_base (4)..(7): a, c, t, g, unknown or other
  modified_base (14)..(26): a, c, t, g, unknown or other
gagnnnnggatggnnnnnnnnnnnnn

SEQ ID NO: 1628 - DNA, 22 bp, Artificial Sequence
  source: /note="Description of Artificial Sequence: Synthetic oligonucleotide"
  modified_base (7)..(11): a, c, t, g, unknown or other
  modified_base (16)..(22): a, c, t, g, unknown or other
ctggagnnnnnrtgtnnnnnnn

SEQ ID NO: 1629 - DNA, 16 bp, Artificial Sequence
  source: /note="Description of Artificial Sequence: Synthetic oligonucleotide"
  modified_base (4)..(5): a, c, t, g, unknown or other
  modified_base (13)..(16): a, c, t, g, unknown or other
caynncgtctcannnn

SEQ ID NO: 1630 - DNA, 28 bp, Artificial Sequence
  source: /note="Description of Artificial Sequence: Synthetic oligonucleotide"
  modified_base (9)..(11): a, c, t, g, unknown or other
  modified_base (16)..(28): a, c, t, g, unknown or other
gcacccagnnnttggnnnnnnnnnnnnn

SEQ ID NO: 1631 - DNA, 29 bp, Artificial Sequence
  source: /note="Description of Artificial Sequence: Synthetic oligonucleotide"
  modified_base (10)..(12): a, c, t, g, unknown or other
  modified_base (16)..(29): a, c, t, g, unknown or other
ccaacccagnnntgcnnnnnnnnnnnnnn

SEQ ID NO: 1632 - DNA, 16 bp, Artificial Sequence
  source: /note="Description of Artificial Sequence: Synthetic oligonucleotide"
  modified_base (4)..(5): a, c, t, g, unknown or other
  modified_base (12)..(16): a, c, t, g, unknown or other
gacnnggtctcnnnnn

SEQ ID NO: 1633 - DNA, 16 bp, Artificial Sequence
  source: /note="Description of Artificial Sequence: Synthetic oligonucleotide"
  modified_base (1)..(5): a, c, t, g, unknown or other
  modified_base (12)..(13): a, c, t, g, unknown or other
nnnnngagaccnnctg

SEQ ID NO: 1634 - DNA, 12 bp, Artificial Sequence
  source: /note="Description of Artificial Sequence: Synthetic oligonucleotide"
  modified_base (9)..(12): a, c, t, g, unknown or other
gaagacgcnnnn

SEQ ID NO: 1635 - DNA, 15 bp, Artificial Sequence
  source: /note="Description of Artificial Sequence: Synthetic oligonucleotide"
  modified_base (10)..(15): a, c, t, g, unknown or other
ttcgaagacnnnnnn

SEQ ID NO: 1636 - DNA, 14 bp, Artificial Sequence
  source: /note="Description of Artificial Sequence: Synthetic oligonucleotide"
  modified_base (11)..(14): a, c, t, g, unknown or other
gaagctcttcnnnn

SEQ ID NO: 1637 - DNA, 13 bp, Artificial Sequence
  source: /note="Description of Artificial Sequence: Synthetic oligonucleotide"
  modified_base (10)..(13): a, c, t, g, unknown or other
gagctcttcnnnn

SEQ ID NO: 1638 - DNA, 28 bp, Artificial Sequence
  source: /note="Description of Artificial Sequence: Synthetic oligonucleotide"
gacttggtctcatgcctgagaccaagtc

SEQ ID NO: 1639 - DNA, 20 bp, Artificial Sequence
  source: /note="Description of Artificial Sequence: Synthetic oligonucleotide"
gaagacgctgccgcgtcttc

SEQ ID NO: 1640 - DNA, 25 bp, Artificial Sequence
  source: /note="Description of Artificial Sequence: Synthetic oligonucleotide"
gaagctcttcagcctgaagagcttc

SEQ ID NO: 1641 - DNA, 16 bp, Artificial Sequence
  source: /note="Description of Artificial Sequence: Synthetic oligonucleotide"
cttcaggtctcagaag

SEQ ID NO: 1642 - DNA, 12 bp, Artificial Sequence
  source: /note="Description of Artificial Sequence: Synthetic oligonucleotide"
gaagacaagtca

SEQ ID NO: 1643 - DNA, 14 bp, Artificial Sequence
  source: /note="Description of Artificial Sequence: Synthetic oligonucleotide"
cgtgctcttcaggt

SEQ ID NO: 1644 - DNA, 16 bp, Artificial Sequence
  source: /note="Description of Artificial Sequence: Synthetic oligonucleotide"
  modified_base (13)..(16): a, c, t, g, unknown or other
gacttggtctcannnn

SEQ ID NO: 1645 - DNA, 16 bp, Artificial Sequence
  source: /note="Description of Artificial Sequence: Synthetic oligonucleotide"
  modified_base (1)..(4): a, c, t, g, unknown or other
nnnntgagaccaagtc

SEQ ID NO: 1646 - DNA, 16 bp, Artificial Sequence
  source: /note="Description of Artificial Sequence: Synthetic oligonucleotide"
  modified_base (13)..(16): a, c, t, g, unknown or other
gacttggtctcannnn

SEQ ID NO: 1647 - DNA, 16 bp, Artificial Sequence
  source: /note="Description of Artificial Sequence: Synthetic oligonucleotide"
  modified_base (1)..(4): a, c, t, g, unknown or other
nnnntgagaccaagtc

SEQ ID NO: 1648 - DNA, 16 bp, Artificial Sequence
  source: /note="Description of Artificial Sequence: Synthetic oligonucleotide"
  modified_base (13)..(16): a, c, t, g, unknown or other
gacttggtctcannnn

SEQ ID NO: 1649 - DNA, 16 bp, Artificial Sequence
  source: /note="Description of Artificial Sequence: Synthetic oligonucleotide"
  modified_base (1)..(4): a, c, t, g, unknown or other
nnnntgagaccaagtc

SEQ ID NO: 1650 - DNA, 16 bp, Artificial Sequence
  source: /note="Description of Artificial Sequence: Synthetic oligonucleotide"
  modified_base (13)..(16): a, c, t, g, unknown or other
gacttggtctcannnn

SEQ ID NO: 1651 - DNA, 16 bp, Artificial Sequence
  source: /note="Description of Artificial Sequence: Synthetic oligonucleotide"
  modified_base (1)..(4): a, c, t, g, unknown or other
nnnntgagaccaagtc

SEQ ID NO: 1652 - DNA, 28 bp, Artificial Sequence
  source: /note="Description of Artificial Sequence: Synthetic oligonucleotide"
  modified_base (13)..(16): a, c, t, g, unknown or other
gacttggtctcannnntgagaccgcagc

SEQ ID NO: 1653 - DNA, 28 bp, Artificial Sequence
  source: /note="Description of Artificial Sequence: Synthetic oligonucleotide"
  modified_base (13)..(16): a, c, t, g, unknown or other
gtgacggtctcannnntgagaccaagtc

SEQ ID NO: 1654 - DNA, 16 bp, Artificial Sequence
  source: /note="Description of Artificial Sequence: Synthetic oligonucleotide"
  modified_base (13)..(16): a, c, t, g, unknown or other
gacttggtctcannnn

SEQ ID NO: 1655 - DNA, 16 bp, Artificial Sequence
  source: /note="Description of Artificial Sequence: Synthetic oligonucleotide"
  modified_base (1)..(4): a, c, t, g, unknown or other
nnnntgagaccaagtc

SEQ ID NO: 1656 - DNA, 16 bp, Artificial Sequence
  source: /note="Description of Artificial Sequence: Synthetic oligonucleotide"
  modified_base (13)..(16): a, c, t, g, unknown or other
gacttggtctcannnn

SEQ ID NO: 1657 - DNA, 16 bp, Artificial Sequence
  source: /note="Description of Artificial Sequence: Synthetic oligonucleotide"
  modified_base (1)..(4): a, c, t, g, unknown or other
nnnntgagaccaagtc

SEQ ID NO: 1658 - DNA, 11 bp, Artificial Sequence
  source: /note="Description of Artificial Sequence: Synthetic oligonucleotide"
ggtctcaaatg

SEQ ID NO: 1659 - DNA, 11 bp, Artificial Sequence
  source: /note="Description of Artificial Sequence: Synthetic oligonucleotide"
actatgagacc

SEQ ID NO: 1660 - DNA, 11 bp, Artificial Sequence
  source: /note="Description of Artificial Sequence: Synthetic oligonucleotide"
ggtctcaacta

SEQ ID NO: 1661 - DNA, 11 bp, Artificial Sequence
  source: /note="Description of Artificial Sequence: Synthetic oligonucleotide"
atcttgagacc

SEQ ID NO: 1662 - DNA, 11 bp, Artificial Sequence
  source: /note="Description of Artificial Sequence: Synthetic oligonucleotide"
ggtctcaatct

SEQ ID NO: 1663 - DNA, 11 bp, Artificial Sequence
  source: /note="Description of Artificial Sequence: Synthetic oligonucleotide"
gctttgagacc

SEQ ID NO: 1664 - DNA, 16 bp, Artificial Sequence
  source: /note="Description of Artificial Sequence: Synthetic oligonucleotide"
  modified_base (13)..(16): a, c, t, g, unknown or other
gacttggtctcannnn

SEQ ID NO: 1665 - DNA, 11 bp, Artificial Sequence
  source: /note="Description of Artificial Sequence: Synthetic oligonucleotide"
aatgtgagacc

SEQ ID NO: 1666 - DNA, 11 bp, Artificial Sequence
  source: /note="Description of Artificial Sequence: Synthetic oligonucleotide"
ggtctcagctt

SEQ ID NO: 1667 - DNA, 16 bp, Artificial Sequence
  source: /note="Description of Artificial Sequence: Synthetic oligonucleotide"
  modified_base (1)..(4): a, c, t, g, unknown or other
nnnntgagaccaagtc

SEQ ID NO: 1668 - DNA, 16 bp, Artificial Sequence
  source: /note="Description of Artificial Sequence: Synthetic oligonucleotide"
  modified_base (13)..(16): a, c, t, g, unknown or other
gacttggtctcannnn

SEQ ID NO: 1669 - DNA, 16 bp, Artificial Sequence
  source: /note="Description of Artificial Sequence: Synthetic oligonucleotide"
  modified_base (1)..(4): a, c, t, g, unknown or other
nnnntgagaccaagtc

SEQ ID NO: 1670 - DNA, 11 bp, Artificial Sequence
  source: /note="Description of Artificial Sequence: Synthetic oligonucleotide"
  modified_base (8)..(11): a, c, t, g, unknown or other
ggtctcannnn

SEQ ID NO: 1671 - DNA, 11 bp, Artificial Sequence
  source: /note="Description of Artificial Sequence: Synthetic oligonucleotide"
aatgtgagacc

SEQ ID NO: 1672 - DNA, 11 bp, Artificial Sequence
  source: /note="Description of Artificial Sequence: Synthetic oligonucleotide"
ggtctcaaatg

SEQ ID NO: 1673 - DNA, 11 bp, Artificial Sequence
  source: /note="Description of Artificial Sequence: Synthetic oligonucleotide"
actatgagacc

SEQ ID NO: 1674 - DNA, 11 bp, Artificial Sequence
  source: /note="Description of Artificial Sequence: Synthetic oligonucleotide"
ggtctcaacta

SEQ ID NO: 1675 - DNA, 11 bp, Artificial Sequence
  source: /note="Description of Artificial Sequence: Synthetic oligonucleotide"
atcttgagacc

SEQ ID NO: 1676 - DNA, 11 bp, Artificial Sequence
  source: /note="Description of Artificial Sequence: Synthetic oligonucleotide"
ggtctcaatct

SEQ ID NO: 1677 - DNA, 11 bp, Artificial Sequence
  source: /note="Description of Artificial Sequence: Synthetic oligonucleotide"
gctttgagacc

SEQ ID NO: 1678 - DNA, 11 bp, Artificial Sequence
  source: /note="Description of Artificial Sequence: Synthetic oligonucleotide"
ggtctcaatct

SEQ ID NO: 1679 - DNA, 11 bp, Artificial Sequence
  source: /note="Description of Artificial Sequence: Synthetic oligonucleotide"
  modified_base (1)..(4): a, c, t, g, unknown or other
nnnntgagacc

SEQ ID NO: 1680 - DNA, 23 bp, Artificial Sequence
  source: /note="Description of Artificial Sequence: Synthetic oligonucleotide"
  modified_base (13)..(16): a, c, t, g, unknown or other
gacttggtctcannnntgagacc

SEQ ID NO: 1681 - DNA, 23 bp, Artificial Sequence
  source: /note="Description of Artificial Sequence: Synthetic oligonucleotide"
  modified_base (8)..(11): a, c, t, g, unknown or other
ggtctcannnntgagaccaagtc

SEQ ID NO: 1682 - DNA, 16 bp, Artificial Sequence
  source: /note="Description of Artificial Sequence: Synthetic oligonucleotide"
  modified_base (13)..(16): a, c, t, g, unknown or other
gacttggtctcannnn

SEQ ID NO: 1683 - DNA, 16 bp, Artificial Sequence
  source: /note="Description of Artificial Sequence: Synthetic oligonucleotide"
  modified_base (1)..(4): a, c, t, g, unknown or other
nnnntgagaccaagtc

SEQ ID NO: 1684 - DNA, 23 bp, Artificial Sequence
  source: /note="Description of Artificial Sequence: Synthetic oligonucleotide"
gacttggtctcactcctgagacc

SEQ ID NO: 1685 - DNA, 19 bp, Artificial Sequence
  source: /note="Description of Artificial Sequence: Synthetic oligonucleotide"
ggtctcacgagaccaagtc

SEQ ID NO: 1686 - DNA, 19 bp, Artificial Sequence
  source: /note="Description of Artificial Sequence: Synthetic oligonucleotide"
gacttggtctcctgagacc

SEQ ID NO: 1687 - DNA, 19 bp, Artificial Sequence
  source: /note="Description of Artificial Sequence: Synthetic oligonucleotide"
ggtctcacgagaccaagtc

SEQ ID NO: 1688 - DNA, 19 bp, Artificial Sequence
  source: /note="Description of Artificial Sequence: Synthetic oligonucleotide"
gacttggtctcctgagacc

SEQ ID NO: 1689 - DNA, 23 bp, Artificial Sequence
  source: /note="Description of Artificial Sequence: Synthetic oligonucleotide"
ggtctcacgagtgagaccaagtc

SEQ ID NO: 1690 - DNA, 23 bp, Artificial Sequence
  source: /note="Description of Artificial Sequence: Synthetic oligonucleotide"
gacttggtctcactcctgagacc

SEQ ID NO: 1691 - DNA, 19 bp, Artificial Sequence
  source: /note="Description of Artificial Sequence: Synthetic oligonucleotide"
ggtctcacgagaccaagtc

SEQ ID NO: 1692 - DNA, 15 bp, Artificial Sequence
  source: /note="Description of Artificial Sequence: Synthetic oligonucleotide"
  modified_base (12)..(15): a, c, t, g, unknown or other
ggtctcactccnnnn

SEQ ID NO: 1693 - DNA, 15 bp, Artificial Sequence
  source: /note="Description of Artificial Sequence: Synthetic oligonucleotide"
  modified_base (1)..(4): a, c, t, g, unknown or other
nnnncgagcgagacc

SEQ ID NO: 1694 - DNA, 20 bp, Artificial Sequence
  source: /note="Description of Artificial Sequence: Synthetic oligonucleotide"
  modified_base (17)..(20): a, c, t, g, unknown or other
gacttggtctcactccnnnn

SEQ ID NO: 1695 - DNA, 16 bp, Artificial Sequence
  source: /note="Description of Artificial Sequence: Synthetic oligonucleotide"
  modified_base (1)..(4): a, c, t, g, unknown or other
nnnncgagaccaagtc

SEQ ID NO: 1696 - DNA, 16 bp, Artificial Sequence
  source: /note="Description of Artificial Sequence: Synthetic oligonucleotide"
actgaggtctcactcc

SEQ ID NO: 1697 - DNA, 16 bp, Artificial Sequence
  source: /note="Description of Artificial Sequence: Synthetic oligonucleotide"
cgagtgagacctcagt

SEQ ID NO: 1698 - DNA, 16 bp, Artificial Sequence
  source: /note="Description of Artificial Sequence: Synthetic oligonucleotide"
actgaggtctcactcc

SEQ ID NO: 1699 - DNA, 16 bp, Artificial Sequence
  source: /note="Description of Artificial Sequence: Synthetic oligonucleotide"
cgagtgagacctcagt

SEQ ID NO: 1700 - DNA, 16 bp, Artificial Sequence
  source: /note="Description of Artificial Sequence: Synthetic oligonucleotide"
actgaggtctcactcc

SEQ ID NO: 1701 - DNA, 16 bp, Artificial Sequence
  source: /note="Description of Artificial Sequence: Synthetic oligonucleotide"
cgagtgagacctcagt

SEQ ID NO: 1702 - DNA, 23 bp, Artificial Sequence
  source: /note="Description of Artificial Sequence: Synthetic oligonucleotide"
ggtctccacaactccacaactcc

SEQ ID NO: 1703 - DNA, 15 bp, Artificial Sequence
  source: /note="Description of Artificial Sequence: Synthetic oligonucleotide"
gaagacaatgagacc

SEQ ID NO: 1704 - DNA, 20 bp, Artificial Sequence
  source: /note="Description of Artificial Sequence: Synthetic oligonucleotide"
gaagacaactccacaactcc

SEQ ID NO: 1705 - DNA, 15 bp, Artificial Sequence
  source: /note="Description of Artificial Sequence: Synthetic oligonucleotide"
ggtctccttgtcttc

SEQ ID NO: 1706 - DNA, 15 bp, Artificial Sequence
  source: /note="Description of Artificial Sequence: Synthetic oligonucleotide"
ggtctccacaactcc

SEQ ID NO: 1707 - DNA, 15 bp, Artificial Sequence
  source: /note="Description of Artificial Sequence: Synthetic oligonucleotide"
gaagacaatgagacc

SEQ ID NO: 1708 - DNA, 12 bp, Artificial Sequence
  source: /note="Description of Artificial Sequence: Synthetic oligonucleotide"
gaagacaactcc

SEQ ID NO: 1709 - DNA, 16 bp, Artificial Sequence
  source: /note="Description of Artificial Sequence: Synthetic oligonucleotide"
gacttggtctcactcc

SEQ ID NO: 1710 - DNA, 23 bp, Artificial Sequence
  source: /note="Description of Artificial Sequence: Synthetic oligonucleotide"
gacttggtctcactcctgagacc

SEQ ID NO: 1711 - DNA, 16 bp, Artificial Sequence
  source: /note="Description of Artificial Sequence: Synthetic oligonucleotide"
gacttggtctcactcc

SEQ ID NO: 1712 - DNA, 23 bp, Artificial Sequence
  source: /note="Description of Artificial Sequence: Synthetic oligonucleotide"
gacttggtctcactcctgagacc

SEQ ID NO: 1713 - DNA, 16 bp, Artificial Sequence
  source: /note="Description of Artificial Sequence: Synthetic oligonucleotide"
gacttggtctcactcc

SEQ ID NO: 1714 - DNA, 23 bp, Artificial Sequence
  source: /note="Description of Artificial Sequence: Synthetic oligonucleotide"
gacttggtctcactcctgagacc

SEQ ID NO: 1715 - DNA, 16 bp, Artificial Sequence
  source: /note="Description of Artificial Sequence: Synthetic oligonucleotide"
gacttggtctcactcc

SEQ ID NO: 1716 - DNA, 14 bp, Artificial Sequence
  source: /note="Description of Artificial Sequence: Synthetic oligonucleotide"
tcctgaagagcacg

SEQ ID NO: 1717 - DNA, 11 bp, Artificial Sequence
  source: /note="Description of Artificial Sequence: Synthetic oligonucleotide"
ggtctcatgat

SEQ ID NO: 1718 - DNA, 11 bp, Artificial Sequence
  source: /note="Description of Artificial Sequence: Synthetic oligonucleotide"
tgattgagacc

SEQ ID NO: 1719 - DNA, 11 bp, Artificial Sequence
  source: /note="Description of Artificial Sequence: Synthetic oligonucleotide"
ggtctcatgat

SEQ ID NO: 1720 - DNA, 11 bp, Artificial Sequence
  source: /note="Description of Artificial Sequence: Synthetic oligonucleotide"
tgattgagacc
